United States Patent Application Publication US 2026/0275387 A1, published September 17, 2026 (application 19/167,641).

The application's sequence listing, which the Patent Office published only in electronic form, follows.

SEQUENCE LISTING (25691 sequences)

SEQ ID NO: 1 - RNA, 20 nt, synthetic construct
  source 1..20: mol_type = other RNA
aaaagaatcccgcccataat

SEQ ID NO: 2 - RNA, 20 nt, synthetic construct
  source 1..20: mol_type = other RNA
aaagaatcccgcccataatc

SEQ ID NO: 3 - RNA, 20 nt, synthetic construct
  source 1..20: mol_type = other RNA
aaaggagggagggcttcttc

SEQ ID NO: 4 - RNA, 20 nt, synthetic construct
  source 1..20: mol_type = other RNA
aaatcttacagctgctcact

SEQ ID NO: 5 - RNA, 20 nt, synthetic construct
  source 1..20: mol_type = other RNA
aacgcccagggaccaagtta

SEQ ID NO: 6 - RNA, 20 nt, synthetic construct
  source 1..20: mol_type = other RNA
aactcccataaaggtattgc

SEQ ID NO: 7 - RNA, 20 nt, synthetic construct
  source 1..20: mol_type = other RNA
aacttggtccctgggcgttg

SEQ ID NO: 8 - RNA, 20 nt, synthetic construct
  source 1..20: mol_type = other RNA
aagaagccctccctcctttc

SEQ ID NO: 9 - RNA, 20 nt, synthetic construct
  source 1..20: mol_type = other RNA
aagaatcccgcccataatcg

SEQ ID NO: 10 - RNA, 20 nt, synthetic construct
  source 1..20: mol_type = other RNA
aagacgggaggcagcagaga

SEQ ID NO: 11 - RNA, 20 nt, synthetic construct
  source 1..20: mol_type = other RNA
aagccctccctcctttcctc

SEQ ID NO: 12 - RNA, 20 nt, synthetic construct
  source 1..20: mol_type = other RNA
aagcctaggcaaaagaatcc

SEQ ID NO: 13 - RNA, 20 nt, synthetic construct
  source 1..20: mol_type = other RNA
aagcgactcgacatggaggc

SEQ ID NO: 14 - RNA, 20 nt, synthetic construct
  source 1..20: mol_type = other RNA
aaggaccgccctgggcctgg

SEQ ID NO: 15 - RNA, 20 nt, synthetic construct
  source 1..20: mol_type = other RNA
aaggagggagggcttcttcc

SEQ ID NO: 16 - RNA, 20 nt, synthetic construct
  source 1..20: mol_type = other RNA
aaggggctaacttggtccct

SEQ ID NO: 17 - RNA, 20 nt, synthetic construct
  source 1..20: mol_type = other RNA
aagttagccccttaagccta

SEQ ID NO: 18 - RNA, 20 nt, synthetic construct
  source 1..20: mol_type = other RNA
aatacctttatgggagttct

SEQ ID NO: 19 - RNA, 20 nt, synthetic construct
  source 1..20: mol_type = other RNA
aatcccgcccataatcgaga

SEQ ID NO: 20 - RNA, 20 nt, synthetic construct
  source 1..20: mol_type = other RNA
aatcgagaagcgactcgaca

SEQ ID NO: 21 - RNA, 20 nt, synthetic construct
  source 1..20: mol_type = other RNA
aatcttacagctgctcactc

SEQ ID NO: 22 - RNA, 20 nt, synthetic construct
  source 1..20: mol_type = other RNA
acaagacgggaggcagcaga

SEQ ID NO: 23 - RNA, 20 nt, synthetic construct
  source 1..20: mol_type = other RNA
acagctgctcactcccctgc

SEQ ID NO: 24 - RNA, 20 nt, synthetic construct
  source 1..20: mol_type = other RNA
acatggaggcgatgacgaga

SEQ ID NO: 25 - RNA, 20 nt, synthetic construct
  source 1..20: mol_type = other RNA
accaagttagccccttaagc

SEQ ID NO: 26 - RNA, 20 nt, synthetic construct
  source 1..20: mol_type = other RNA
accgccctgggcctggaaga

SEQ ID NO: 27 - RNA, 20 nt, synthetic construct
  source 1..20: mol_type = other RNA
acctttatgggagttctctg

SEQ ID NO: 28 - RNA, 20 nt, synthetic construct
  source 1..20: mol_type = other RNA
acgagatcacgcgaggagga

SEQ ID NO: 29 - RNA, 20 nt, synthetic construct
  source 1..20: mol_type = other RNA
acgcccagggaccaagttag

SEQ ID NO: 30 - RNA, 20 nt, synthetic construct
  source 1..20: mol_type = other RNA
acgcgaggaggaaaggaggg

SEQ ID NO: 31 - RNA, 20 nt, synthetic construct
  source 1..20: mol_type = other RNA
acgggaggcagcagagaact

SEQ ID NO: 32 - RNA, 20 nt, synthetic construct
  source 1..20: mol_type = other RNA
actcccataaaggtattgcg

SEQ ID NO: 33 - RNA, 20 nt, synthetic construct
  source 1..20: mol_type = other RNA
actcccctgcagggcaacgc

SEQ ID NO: 34 - RNA, 20 nt, synthetic construct
  source 1..20: mol_type = other RNA
actcgacatggaggcgatga

SEQ ID NO: 35 - RNA, 20 nt, synthetic construct
  source 1..20: mol_type = other RNA
acttggtccctgggcgttgc

SEQ ID NO: 36 - RNA, 20 nt, synthetic construct
  source 1..20: mol_type = other RNA
agaactcccataaaggtatt

SEQ ID NO: 37 - RNA, 20 nt, synthetic construct
  source 1..20: mol_type = other RNA
agaagccctccctcctttcc

SEQ ID NO: 38 - RNA, 20 nt, synthetic construct
  source 1..20: mol_type = other RNA
agaagcgactcgacatggag

SEQ ID NO: 39 - RNA, 20 nt, synthetic construct
  source 1..20: mol_type = other RNA
agaatcccgcccataatcga

SEQ ID NO: 40 - RNA, 20 nt, synthetic construct
  source 1..20: mol_type = other RNA
agacgggaggcagcagagaa

SEQ ID NO: 41 - RNA, 20 nt, synthetic construct
  source 1..20: mol_type = other RNA
agagaactcccataaaggta

SEQ ID NO: 42 - RNA, 20 nt, synthetic construct
  source 1..20: mol_type = other RNA
agatcacgcgaggaggaaag

SEQ ID NO: 43 - RNA, 20 nt, synthetic construct
  source 1..20: mol_type = other RNA
agcagagaactcccataaag

SEQ ID NO: 44 - RNA, 20 nt, synthetic construct
  source 1..20: mol_type = other RNA
agcagctgtaagatttgagg

SEQ ID NO: 45 - RNA, 20 nt, synthetic construct
  source 1..20: mol_type = other RNA
agccccttaagcctaggcaa

SEQ ID NO: 46 - RNA, 20 nt, synthetic construct
  source 1..20: mol_type = other RNA
agccctccctcctttcctcc

SEQ ID NO: 47 - RNA, 20 nt, synthetic construct
  source 1..20: mol_type = other RNA
agcctaggcaaaagaatccc

SEQ ID NO: 48 - RNA, 20 nt, synthetic construct
  source 1..20: mol_type = other RNA
agcgactcgacatggaggcg

SEQ ID NO: 49 - RNA, 20 nt, synthetic construct
  source 1..20: mol_type = other RNA
agctgctcactcccctgcag

SEQ ID NO: 50 - RNA, 20 nt, synthetic construct
  source 1..20: mol_type = other RNA
aggaaaggagggagggcttc

SEQ ID NO: 51 - RNA, 20 nt, synthetic construct
  source 1..20: mol_type = other RNA
aggaccgccctgggcctgga

SEQ ID NO: 52 - RNA, 20 nt, synthetic construct
  source 1..20: mol_type = other RNA
aggaggaaaggagggagggc

SEQ ID NO: 53 - RNA, 20 nt, synthetic construct
  source 1..20: mol_type = other RNA
aggagggagggcttcttcca

SEQ ID NO: 54 - RNA, 20 nt, synthetic construct
  source 1..20: mol_type = other RNA
aggcaaaagaatcccgccca

SEQ ID NO: 55 - RNA, 20 nt, synthetic construct
  source 1..20: mol_type = other RNA
aggcagcagagaactcccat

SEQ ID NO: 56 - RNA, 20 nt, synthetic construct
  source 1..20: mol_type = other RNA
aggcccagggcggtccttac

SEQ ID NO: 57 - RNA, 20 nt, synthetic construct
  source 1..20: mol_type = other RNA
aggcgatgacgagatcacgc

SEQ ID NO: 58 - RNA, 20 nt, synthetic construct
  source 1..20: mol_type = other RNA
aggcttaaggggctaacttg

SEQ ID NO: 59 - RNA, 20 nt, synthetic construct
  source 1..20: mol_type = other RNA
agggaccaagttagcccctt

SEQ ID NO: 60 - RNA, 20 nt, synthetic construct
  source 1..20: mol_type = other RNA
agggagggcttcttccaggc

SEQ ID NO: 61 - RNA, 20 nt, synthetic construct
  source 1..20: mol_type = other RNA
agggcaacgcccagggacca

SEQ ID NO: 62 - RNA, 20 nt, synthetic construct
  source 1..20: mol_type = other RNA
agggcggtccttacaagacg

SEQ ID NO: 63 - RNA, 20 nt, synthetic construct
  source 1..20: mol_type = other RNA
agggcttcttccaggcccag

SEQ ID NO: 64 - RNA, 20 nt, synthetic construct
  source 1..20: mol_type = other RNA
aggggagtgagcagctgtaa

SEQ ID NO: 65 - RNA, 20 nt, synthetic construct
  source 1..20: mol_type = other RNA
aggggagtgccgcaatacct

SEQ ID NO: 66 - RNA, 20 nt, synthetic construct
  source 1..20: mol_type = other RNA
aggggctaacttggtccctg

SEQ ID NO: 67 - RNA, 20 nt, synthetic construct
  source 1..20: mol_type = other RNA
agtcgcccctcaaatcttac

SEQ ID NO: 68 - RNA, 20 nt, synthetic construct
  source 1..20: mol_type = other RNA
agtcgcttctcgattatggg

SEQ ID NO: 69 - RNA, 20 nt, synthetic construct
  source 1..20: mol_type = other RNA
agtgagcagctgtaagattt

SEQ ID NO: 70 - RNA, 20 nt, synthetic construct
  source 1..20: mol_type = other RNA
agtgccgcaatacctttatg

SEQ ID NO: 71 - RNA, 20 nt, synthetic construct
  source 1..20: mol_type = other RNA
agttagccccttaagcctag

SEQ ID NO: 72 - RNA, 20 nt, synthetic construct
  source 1..20: mol_type = other RNA
agttctctgctgcctcccgt

SEQ ID NO: 73 - RNA, 20 nt, synthetic construct
  source 1..20: mol_type = other RNA
ataaaggtattgcggcactc

SEQ ID NO: 74 - RNA, 20 nt, synthetic construct
  source 1..20: mol_type = other RNA
ataatcgagaagcgactcga

SEQ ID NO: 75 - RNA, 20 nt, synthetic construct
  source 1..20: mol_type = other RNA
atacctttatgggagttctc

SEQ ID NO: 76 - RNA, 20 nt, synthetic construct
  source 1..20: mol_type = other RNA
atcacgcgaggaggaaagga

SEQ ID NO: 77 - RNA, 20 nt, synthetic construct
  source 1..20: mol_type = other RNA
atcccgcccataatcgagaa

SEQ ID NO: 78 - RNA, 20 nt, synthetic construct
  source 1..20: mol_type = other RNA
atcgagaagcgactcgacat

SEQ ID NO: 79 - RNA, 20 nt, synthetic construct
  source 1..20: mol_type = other RNA
atcgcctccatgtcgagtcg

SEQ ID NO: 80 - RNA, 20 nt, synthetic construct
  source 1..20: mol_type = other RNA
atctcgtcatcgcctccatg

SEQ ID NO: 81 - RNA, 20 nt, synthetic construct
  source 1..20: mol_type = other RNA
atcttacagctgctcactcc

SEQ ID NO: 82 - RNA, 20 nt, synthetic construct
  source 1..20: mol_type = other RNA
atgacgagatcacgcgagga

SEQ ID NO: 83 - RNA, 20 nt, synthetic construct
  source 1..20: mol_type = other RNA
atggaggcgatgacgagatc

SEQ ID NO: 84 - RNA, 20 nt, synthetic construct
  source 1..20: mol_type = other RNA
atgggagttctctgctgcct

SEQ ID NO: 85 - RNA, 20 nt, synthetic construct
  source 1..20: mol_type = other RNA
atgggcgggattcttttgcc

SEQ ID NO: 86 - RNA, 20 nt, synthetic construct
  source 1..20: mol_type = other RNA
atgtcgagtcgcttctcgat

SEQ ID NO: 87 - RNA, 20 nt, synthetic construct
  source 1..20: mol_type = other RNA
attatgggcgggattctttt

SEQ ID NO: 88 - RNA, 20 nt, synthetic construct
  source 1..20: mol_type = other RNA
attcttttgcctaggcttaa

SEQ ID NO: 89 - RNA, 20 nt, synthetic construct
  source 1..20: mol_type = other RNA
caaaagaatcccgcccataa

SEQ ID NO: 90 - RNA, 20 nt, synthetic construct
  source 1..20: mol_type = other RNA
caaatcttacagctgctcac

SEQ ID NO: 91 - RNA, 20 nt, synthetic construct
  source 1..20: mol_type = other RNA
caacgcccagggaccaagtt

SEQ ID NO: 92 - RNA, 20 nt, synthetic construct
  source 1..20: mol_type = other RNA
caagacgggaggcagcagag

SEQ ID NO: 93 - RNA, 20 nt, synthetic construct
  source 1..20: mol_type = other RNA
caagttagccccttaagcct

SEQ ID NO: 94 - RNA, 20 nt, synthetic construct
  source 1..20: mol_type = other RNA
caatacctttatgggagttc

SEQ ID NO: 95 - RNA, 20 nt, synthetic construct
  source 1..20: mol_type = other RNA
cacgcgaggaggaaaggagg

SEQ ID NO: 96 - RNA, 20 nt, synthetic construct
  source 1..20: mol_type = other RNA
cactcccctgcagggcaacg

SEQ ID NO: 97 - RNA, 20 nt, synthetic construct
  source 1..20: mol_type = other RNA
cagagaactcccataaaggt

SEQ ID NO: 98 - RNA, 20 nt, synthetic construct
  source 1..20: mol_type = other RNA
cagcagagaactcccataaa

SEQ ID NO: 99 - RNA, 20 nt, synthetic construct
  source 1..20: mol_type = other RNA
cagctgctcactcccctgca

SEQ ID NO: 100 - RNA, 20 nt, synthetic construct
  source 1..20: mol_type = other RNA
cagctgtaagatttgagggg

SEQ ID NO: 101 - RNA, 20 nt, synthetic construct
  source 1..20: mol_type = other RNA
caggcccagggcggtcctta

SEQ ID NO: 102 - RNA, 20 nt, synthetic construct
  source 1..20: mol_type = other RNA
cagggaccaagttagcccct

SEQ ID NO: 103 - RNA, 20 nt, synthetic construct
  source 1..20: mol_type = other RNA
cagggcaacgcccagggacc

SEQ ID NO: 104 - RNA, 20 nt, synthetic construct
  source 1..20: mol_type = other RNA
cagggcggtccttacaagac

SEQ ID NO: 105 - RNA, 20 nt, synthetic construct
  source 1..20: mol_type = other RNA
caggggagtgagcagctgta

SEQ ID NO: 106 - RNA, 20 nt, synthetic construct
  source 1..20: mol_type = other RNA
cataaaggtattgcggcact

SEQ ID NO: 107 - RNA, 20 nt, synthetic construct
  source 1..20: mol_type = other RNA
cataatcgagaagcgactcg

SEQ ID NO: 108 - RNA, 20 nt, synthetic construct
  source 1..20: mol_type = other RNA
catcgcctccatgtcgagtc

SEQ ID NO: 109 - RNA, 20 nt, synthetic construct
  source 1..20: mol_type = other RNA
catggaggcgatgacgagat

SEQ ID NO: 110 - RNA, 20 nt, synthetic construct
  source 1..20: mol_type = other RNA
catgtcgagtcgcttctcga

SEQ ID NO: 111 - RNA, 20 nt, synthetic construct
  source 1..20: mol_type = other RNA
ccaagttagccccttaagcc

SEQ ID NO: 112 - RNA, 20 nt, synthetic construct
  source 1..20: mol_type = other RNA
ccaggcccagggcggtcctt

SEQ ID NO: 113 - RNA, 20 nt, synthetic construct
  source 1..20: mol_type = other RNA
ccagggaccaagttagcccc

SEQ ID NO: 114 - RNA, 20 nt, synthetic construct
  source 1..20: mol_type = other RNA
ccagggcggtccttacaaga

SEQ ID NO: 115 - RNA, 20 nt, synthetic construct
  source 1..20: mol_type = other RNA
ccataaaggtattgcggcac

SEQ ID NO: 116 - RNA, 20 nt, synthetic construct
  source 1..20: mol_type = other RNA
ccataatcgagaagcgactc

SEQ ID NO: 117 - RNA, 20 nt, synthetic construct
  source 1..20: mol_type = other RNA
ccatgtcgagtcgcttctcg

SEQ ID NO: 118 - RNA, 20 nt, synthetic construct
  source 1..20: mol_type = other RNA
cccagggaccaagttagccc

SEQ ID NO: 119 - RNA, 20 nt, synthetic construct
  source 1..20: mol_type = other RNA
cccagggcggtccttacaag

SEQ ID NO: 120 - RNA, 20 nt, synthetic construct
  source 1..20: mol_type = other RNA
cccataaaggtattgcggca

SEQ ID NO: 121 - RNA, 20 nt, synthetic construct
  source 1..20: mol_type = other RNA
cccataatcgagaagcgact

SEQ ID NO: 122 - RNA, 20 nt, synthetic construct
  source 1..20: mol_type = other RNA
cccctcaaatcttacagctg

SEQ ID NO: 123 - RNA, 20 nt, synthetic construct
  source 1..20: mol_type = other RNA
cccctgcagggcaacgccca

SEQ ID NO: 124 - RNA, 20 nt, synthetic construct
  source 1..20: mol_type = other RNA
ccccttaagcctaggcaaaa

SEQ ID NO: 125 - RNA, 20 nt, synthetic construct
  source 1..20: mol_type = other RNA
cccgcccataatcgagaagc

SEQ ID NO: 126 - RNA, 20 nt, synthetic construct
  source 1..20: mol_type = other RNA
cccgtcttgtaaggaccgcc

SEQ ID NO: 127 - RNA, 20 nt, synthetic construct
  source 1..20: mol_type = other RNA
ccctcaaatcttacagctgc

SEQ ID NO: 128 - RNA, 20 nt, synthetic construct
  source 1..20: mol_type = other RNA
ccctccctcctttcctcctc

SEQ ID NO: 129 - RNA, 20 nt, synthetic construct
  source 1..20: mol_type = other RNA
ccctcctttcctcctcgcgt

SEQ ID NO: 130 - RNA, 20 nt, synthetic construct
  source 1..20: mol_type = other RNA
ccctgcagggcaacgcccag

SEQ ID NO: 131 - RNA, 20 nt, synthetic construct
  source 1..20: mol_type = other RNA
ccctgcaggggagtgagcag

SEQ ID NO: 132 - RNA, 20 nt, synthetic construct
  source 1..20: mol_type = other RNA
ccctgggcctggaagaagcc

SEQ ID NO: 133 - RNA, 20 nt, synthetic construct
  source 1..20: mol_type = other RNA
ccctgggcgttgccctgcag

SEQ ID NO: 134 - RNA, 20 nt, synthetic construct
  source 1..20: mol_type = other RNA
cccttaagcctaggcaaaag

SEQ ID NO: 135 - RNA, 20 nt, synthetic construct
  source 1..20: mol_type = other RNA
ccgcaatacctttatgggag

SEQ ID NO: 136 - RNA, 20 nt, synthetic construct
  source 1..20: mol_type = other RNA
ccgcccataatcgagaagcg

SEQ ID NO: 137 - RNA, 20 nt, synthetic construct
  source 1..20: mol_type = other RNA
ccgccctgggcctggaagaa

SEQ ID NO: 138 - RNA, 20 nt, synthetic construct
  source 1..20: mol_type = other RNA
ccgtcttgtaaggaccgccc

SEQ ID NO: 139 - RNA, 20 nt, synthetic construct
  source 1..20: mol_type = other RNA
cctaggcaaaagaatcccgc

SEQ ID NO: 140 - RNA, 20 nt, synthetic construct
  source 1..20: mol_type = other RNA
cctaggcttaaggggctaac

SEQ ID NO: 141 - RNA, 20 nt, synthetic construct
  source 1..20: mol_type = other RNA
cctcaaatcttacagctgct

SEQ ID NO: 142 - RNA, 20 nt, synthetic construct
  source 1..20: mol_type = other RNA
cctccatgtcgagtcgcttc

SEQ ID NO: 143 - RNA, 20 nt, synthetic construct
  source 1..20: mol_type = other RNA
cctcccgtcttgtaaggacc

SEQ ID NO: 144 - RNA, 20 nt, synthetic construct
  source 1..20: mol_type = other RNA
cctccctcctttcctcctcg

SEQ ID NO: 145 - RNA, 20 nt, synthetic construct
  source 1..20: mol_type = other RNA
cctcctcgcgtgatctcgtc

SEQ ID NO: 146 - RNA, 20 nt, synthetic construct
  source 1..20: mol_type = other RNA
cctcctttcctcctcgcgtg

SEQ ID NO: 147 - RNA, 20 nt, synthetic construct
  source 1..20: mol_type = other RNA
cctcgcgtgatctcgtcatc

SEQ ID NO: 148 - RNA, 20 nt, synthetic construct
  source 1..20: mol_type = other RNA
cctgcagggcaacgcccagg

SEQ ID NO: 149 - RNA, 20 nt, synthetic construct
  source 1..20: mol_type = other RNA
cctgcaggggagtgagcagc

SEQ ID NO: 150 - RNA, 20 nt, synthetic construct
  source 1..20: mol_type = other RNA
cctggaagaagccctccctc

SEQ ID NO: 151 - RNA, 20 nt, synthetic construct
  source 1..20: mol_type = other RNA
cctgggcctggaagaagccc

SEQ ID NO: 152 - RNA, 20 nt, synthetic construct
  source 1..20: mol_type = other RNA
cctgggcgttgccctgcagg

SEQ ID NO: 153 - RNA, 20 nt, synthetic construct
  source 1..20: mol_type = other RNA
ccttaagcctaggcaaaaga

SEQ ID NO: 154 - RNA, 20 nt, synthetic construct
  source 1..20: mol_type = other RNA
ccttacaagacgggaggcag

SEQ ID NO: 155 - RNA, 20 nt, synthetic construct
  source 1..20: mol_type = other RNA
cctttatgggagttctctgc

SEQ ID NO: 156 - RNA, 20 nt, synthetic construct
  source 1..20: mol_type = other RNA
cctttcctcctcgcgtgatc

SEQ ID NO: 157 - RNA, 20 nt, synthetic construct
  source 1..20: mol_type = other RNA
cgacatggaggcgatgacga

SEQ ID NO: 158 - RNA, 20 nt, synthetic construct
  source 1..20: mol_type = other RNA
cgactcgacatggaggcgat

SEQ ID NO: 159 - RNA, 20 nt, synthetic construct
  source 1..20: mol_type = other RNA
cgagaagcgactcgacatgg

SEQ ID NO: 160 - RNA, 20 nt, synthetic construct
  source 1..20: mol_type = other RNA
cgagatcacgcgaggaggaa

SEQ ID NO: 161 - RNA, 20 nt, synthetic construct
  source 1..20: mol_type = other RNA
cgaggaggaaaggagggagg

SEQ ID NO: 162 - RNA, 20 nt, synthetic construct
  source 1..20: mol_type = other RNA
cgagtcgcttctcgattatg

SEQ ID NO: 163 - RNA, 20 nt, synthetic construct
  source 1..20: mol_type = other RNA
cgatgacgagatcacgcgag

SEQ ID NO: 164 - RNA, 20 nt, synthetic construct
  source 1..20: mol_type = other RNA
cgattatgggcgggattctt

SEQ ID NO: 165 - RNA, 20 nt, synthetic construct
  source 1..20: mol_type = other RNA
cgcaatacctttatgggagt

SEQ ID NO: 166 - RNA, 20 nt, synthetic construct
  source 1..20: mol_type = other RNA
cgcccagggaccaagttagc

SEQ ID NO: 167 - RNA, 20 nt, synthetic construct
  source 1..20: mol_type = other RNA
cgcccataatcgagaagcga

SEQ ID NO: 168 - RNA, 20 nt, synthetic construct
  source 1..20: mol_type = other RNA
cgcccctcaaatcttacagc

SEQ ID NO: 169 - RNA, 20 nt, synthetic construct
  source 1..20: mol_type = other RNA
cgccctgggcctggaagaag

SEQ ID NO: 170 - RNA, 20 nt, synthetic construct
  source 1..20: mol_type = other RNA
cgcctccatgtcgagtcgct

SEQ ID NO: 171 - RNA, 20 nt, synthetic construct
  source 1..20: mol_type = other RNA
cgcgaggaggaaaggaggga

SEQ ID NO: 172 - RNA, 20 nt, synthetic construct
  source 1..20: mol_type = other RNA
cgcgtgatctcgtcatcgcc

SEQ ID NO: 173 - RNA, 20 nt, synthetic construct
  source 1..20: mol_type = other RNA
cgcttctcgattatgggcgg

SEQ ID NO: 174 - RNA, 20 nt, synthetic construct
  source 1..20: mol_type = other RNA
cggagtcgcccctcaaatct

SEQ ID NO: 175 - RNA, 20 nt, synthetic construct
  source 1..20: mol_type = other RNA
cgggaggcagcagagaactc

SEQ ID NO: 176 - RNA, 20 nt, synthetic construct
  source 1..20: mol_type = other RNA
cgggattcttttgcctaggc

SEQ ID NO: 177 - RNA, 20 nt, synthetic construct
  source 1..20: mol_type = other RNA
cggtccttacaagacgggag

SEQ ID NO: 178 - RNA, 20 nt, synthetic construct
  source 1..20: mol_type = other RNA
cgtcatcgcctccatgtcga

SEQ ID NO: 179 - RNA, 20 nt, synthetic construct
  source 1..20: mol_type = other RNA
cgtcttgtaaggaccgccct

SEQ ID NO: 180 - RNA, 20 nt, synthetic construct
  source 1..20: mol_type = other RNA
cgtgatctcgtcatcgcctc

SEQ ID NO: 181 - RNA, 20 nt, synthetic construct
  source 1..20: mol_type = other RNA
cgttgccctgcaggggagtg

SEQ ID NO: 182 - RNA, 20 nt, synthetic construct
  source 1..20: mol_type = other RNA
ctaacttggtccctgggcgt

SEQ ID NO: 183 - RNA, 20 nt, synthetic construct
  source 1..20: mol_type = other RNA
ctaggcaaaagaatcccgcc

SEQ ID NO: 184 - RNA, 20 nt, synthetic construct
  source 1..20: mol_type = other RNA
ctaggcttaaggggctaact

SEQ ID NO: 185 - RNA, 20 nt, synthetic construct
  source 1..20: mol_type = other RNA
ctcaaatcttacagctgctc

SEQ ID NO: 186 - RNA, 20 nt, synthetic construct
  source 1..20: mol_type = other RNA
ctcactcccctgcagggcaa

SEQ ID NO: 187 - RNA, 20 nt, synthetic construct
  source 1..20: mol_type = other RNA
ctccatgtcgagtcgcttct

SEQ ID NO: 188 - RNA, 20 nt, synthetic construct
  source 1..20: mol_type = other RNA
ctcccataaaggtattgcgg

SEQ ID NO: 189 - RNA, 20 nt, synthetic construct
  source 1..20: mol_type = other RNA
ctcccctgcagggcaacgcc

SEQ ID NO: 190 - RNA, 20 nt, synthetic construct
  source 1..20: mol_type = other RNA
ctcccgtcttgtaaggaccg

SEQ ID NO: 191 - RNA, 20 nt, synthetic construct
  source 1..20: mol_type = other RNA
ctccctcctttcctcctcgc

SEQ ID NO: 192 - RNA, 20 nt, synthetic construct
  source 1..20: mol_type = other RNA
ctcctcgcgtgatctcgtca

SEQ ID NO: 193 - RNA, 20 nt, synthetic construct
  source 1..20: mol_type = other RNA
ctcctttcctcctcgcgtga

SEQ ID NO: 194 - RNA, 20 nt, synthetic construct
  source 1..20: mol_type = other RNA
ctcgacatggaggcgatgac

SEQ ID NO: 195 - RNA, 20 nt, synthetic construct
  source 1..20: mol_type = other RNA
ctcgattatgggcgggattc

SEQ ID NO: 196 - RNA, 20 nt, synthetic construct
  source 1..20: mol_type = other RNA
ctcgcgtgatctcgtcatcg

SEQ ID NO: 197 - RNA, 20 nt, synthetic construct
  source 1..20: mol_type = other RNA
ctcgtcatcgcctccatgtc

SEQ ID NO: 198 - RNA, 20 nt, synthetic construct
  source 1..20: mol_type = other RNA
ctctgctgcctcccgtcttg

SEQ ID NO: 199 - RNA, 20 nt, synthetic construct
  source 1..20: mol_type = other RNA
ctgcagggcaacgcccaggg

SEQ ID NO: 200 - RNA, 20 nt, synthetic construct
  source 1..20: mol_type = other RNA
ctgcaggggagtgagcagct

SEQ ID NO: 201 - RNA, 20 nt, synthetic construct
  source 1..20: mol_type = other RNA
ctgcctcccgtcttgtaagg

SEQ ID NO: 202 - RNA, 20 nt, synthetic construct
  source 1..20: mol_type = other RNA
ctgctcactcccctgcaggg

SEQ ID NO: 203 - RNA, 20 nt, synthetic construct
  source 1..20: mol_type = other RNA
ctgctgcctcccgtcttgta

SEQ ID NO: 204 - RNA, 20 nt, synthetic construct
  source 1..20: mol_type = other RNA
ctggaagaagccctccctcc

SEQ ID NO: 205 - RNA, 20 nt, synthetic construct
  source 1..20: mol_type = other RNA
ctgggcctggaagaagccct

SEQ ID NO: 206 - RNA, 20 nt, synthetic construct
  source 1..20: mol_type = other RNA
ctgggcgttgccctgcaggg

SEQ ID NO: 207 - RNA, 20 nt, synthetic construct
  source 1..20: mol_type = other RNA
cttaagcctaggcaaaagaa

SEQ ID NO: 208 - RNA, 20 nt, synthetic construct
  source 1..20: mol_type = other RNA
cttaaggggctaacttggtc

SEQ ID NO: 209 - RNA, 20 nt, synthetic construct
  source 1..20: mol_type = other RNA
cttacaagacgggaggcagc

SEQ ID NO: 210 - RNA, 20 nt, synthetic construct
  source 1..20: mol_type = other RNA
cttacagctgctcactcccc

SEQ ID NO: 211 - RNA, 20 nt, synthetic construct
  source 1..20: mol_type = other RNA
cttccaggcccagggcggtc

SEQ ID NO: 212 - RNA, 20 nt, synthetic construct
  source 1..20: mol_type = other RNA
cttctcgattatgggcggga

SEQ ID NO: 213 - RNA, 20 nt, synthetic construct
  source 1..20: mol_type = other RNA
cttcttccaggcccagggcg

SEQ ID NO: 214 - RNA, 20 nt, synthetic construct
  source 1..20: mol_type = other RNA
cttggtccctgggcgttgcc

SEQ ID NO: 215 - RNA, 20 nt, synthetic construct
  source 1..20: mol_type = other RNA
cttgtaaggaccgccctggg

SEQ ID NO: 216 - RNA, 20 nt, synthetic construct
  source 1..20: mol_type = other RNA
ctttatgggagttctctgct

SEQ ID NO: 217 - RNA, 20 nt, synthetic construct
  source 1..20: mol_type = other RNA
ctttcctcctcgcgtgatct

SEQ ID NO: 218 - RNA, 20 nt, synthetic construct
  source 1..20: mol_type = other RNA
cttttgcctaggcttaaggg

SEQ ID NO: 219 - RNA, 20 nt, synthetic construct
  source 1..20: mol_type = other RNA
gaaaggagggagggcttctt

SEQ ID NO: 220 - RNA, 20 nt, synthetic construct
  source 1..20: mol_type = other RNA
gaactcccataaaggtattg

SEQ ID NO: 221 - RNA, 20 nt, synthetic construct
  source 1..20: mol_type = other RNA
gaagaagccctccctccttt

SEQ ID NO: 222 - RNA, 20 nt, synthetic construct
  source 1..20: mol_type = other RNA
gaagccctccctcctttcct

SEQ ID NO: 223 - RNA, 20 nt, synthetic construct
  source 1..20: mol_type = other RNA
gaagcgactcgacatggagg

SEQ ID NO: 224 - RNA, 20 nt, synthetic construct
  source 1..20: mol_type = other RNA
gaatcccgcccataatcgag

SEQ ID NO: 225 - RNA, 20 nt, synthetic construct
  source 1..20: mol_type = other RNA
gacatggaggcgatgacgag

SEQ ID NO: 226 - RNA, 20 nt, synthetic construct
  source 1..20: mol_type = other RNA
gaccaagttagccccttaag

SEQ ID NO: 227 - RNA, 20 nt, synthetic construct
  source 1..20: mol_type = other RNA
gaccgccctgggcctggaag

SEQ ID NO: 228 - RNA, 20 nt, synthetic construct
  source 1..20: mol_type = other RNA
gacgagatcacgcgaggagg

SEQ ID NO: 229 - RNA, 20 nt, synthetic construct
  source 1..20: mol_type = other RNA
gacgggaggcagcagagaac

SEQ ID NO: 230 - RNA, 20 nt, synthetic construct
  source 1..20: mol_type = other RNA
gactcgacatggaggcgatg

SEQ ID NO: 231 - RNA, 20 nt, synthetic construct
  source 1..20: mol_type = other RNA
gagaactcccataaaggtat

SEQ ID NO: 232 - RNA, 20 nt, synthetic construct
  source 1..20: mol_type = other RNA
gagaagcgactcgacatgga

SEQ ID NO: 233 - RNA, 20 nt, synthetic construct
  source 1..20: mol_type = other RNA
gagatcacgcgaggaggaaa

SEQ ID NO: 234 - RNA, 20 nt, synthetic construct
  source 1..20: mol_type = other RNA
gagcagctgtaagatttgag

SEQ ID NO: 235 - RNA, 20 nt, synthetic construct
  source 1..20: mol_type = other RNA
gaggaaaggagggagggctt

SEQ ID NO: 236 - RNA, 20 nt, synthetic construct
  source 1..20: mol_type = other RNA
gaggaggaaaggagggaggg

SEQ ID NO: 237 - RNA, 20 nt, synthetic construct
  source 1..20: mol_type = other RNA
gaggcagcagagaactccca

SEQ ID NO: 238 - RNA, 20 nt, synthetic construct
  source 1..20: mol_type = other RNA
gaggcgatgacgagatcacg

SEQ ID NO: 239 - RNA, 20 nt, synthetic construct
  source 1..20: mol_type = other RNA
gagggagggcttcttccagg

SEQ ID NO: 240 - RNA, 20 nt, synthetic construct
  source 1..20: mol_type = other RNA
gagggcttcttccaggccca

SEQ ID NO: 241 - RNA, 20 nt, synthetic construct
  source 1..20: mol_type = other RNA
gaggggagtgccgcaatacc

SEQ ID NO: 242 - RNA, 20 nt, synthetic construct
  source 1..20: mol_type = other RNA
gagtcgcccctcaaatctta

SEQ ID NO: 243 - RNA, 20 nt, synthetic construct
  source 1..20: mol_type = other RNA
gagtcgcttctcgattatgg

SEQ ID NO: 244 - RNA, 20 nt, synthetic construct
  source 1..20: mol_type = other RNA
gagtgagcagctgtaagatt

SEQ ID NO: 245 - RNA, 20 nt, synthetic construct
  source 1..20: mol_type = other RNA
gagtgccgcaatacctttat

SEQ ID NO: 246 - RNA, 20 nt, synthetic construct
  source 1..20: mol_type = other RNA
gagttctctgctgcctcccg

SEQ ID NO: 247 - RNA, 20 nt, synthetic construct
  source 1..20: mol_type = other RNA
gatcacgcgaggaggaaagg

SEQ ID NO: 248 - RNA, 20 nt, synthetic construct
  source 1..20: mol_type = other RNA
gatctcgtcatcgcctccat

SEQ ID NO: 249 - RNA, 20 nt, synthetic construct
  source 1..20: mol_type = other RNA
gatgacgagatcacgcgagg

SEQ ID NO: 250 - RNA, 20 nt, synthetic construct
  source 1..20: mol_type = other RNA
gattatgggcgggattcttt

SEQ ID NO: 251 - RNA, 20 nt, synthetic construct
  source 1..20: mol_type = other RNA
gattcttttgcctaggctta

SEQ ID NO: 252 - RNA, 20 nt, synthetic construct
  source 1..20: mol_type = other RNA
gcaaaagaatcccgcccata

SEQ ID NO: 253 - RNA, 20 nt, synthetic construct
  source 1..20: mol_type = other RNA
gcaacgcccagggaccaagt

SEQ ID NO: 254 - RNA, 20 nt, synthetic construct
  source 1..20: mol_type = other RNA
gcaatacctttatgggagtt

SEQ ID NO: 255 - RNA, 20 nt, synthetic construct
  source 1..20: mol_type = other RNA
gcagagaactcccataaagg

SEQ ID NO: 256 - RNA, 20 nt, synthetic construct
  source 1..20: mol_type = other RNA
gcagcagagaactcccataa

SEQ ID NO: 257 - RNA, 20 nt, synthetic construct
  source 1..20: mol_type = other RNA
gcagctgtaagatttgaggg

SEQ ID NO: 258 - RNA, 20 nt, synthetic construct
  source 1..20: mol_type = other RNA
gcagggcaacgcccagggac

SEQ ID NO: 259 - RNA, 20 nt, synthetic construct
  source 1..20: mol_type = other RNA
gcaggggagtgagcagctgt

SEQ ID NO: 260 - RNA, 20 nt, synthetic construct
  source 1..20: mol_type = other RNA
gcccagggaccaagttagcc

SEQ ID NO: 261 - RNA, 20 nt, synthetic construct
  source 1..20: mol_type = other RNA
gcccagggcggtccttacaa

SEQ ID NO: 262 - RNA, 20 nt, synthetic construct
  source 1..20: mol_type = other RNA
gcccataatcgagaagcgac

SEQ ID NO: 263 - RNA, 20 nt, synthetic construct
  source 1..20: mol_type = other RNA
gcccctcaaatcttacagct

SEQ ID NO: 264 - RNA, 20 nt, synthetic construct
  source 1..20: mol_type = other RNA
gccccttaagcctaggcaaa

SEQ ID NO: 265 - RNA, 20 nt, synthetic construct
  source 1..20: mol_type = other RNA
gccctccctcctttcctcct

SEQ ID NO: 266 - RNA, 20 nt, synthetic construct
  source 1..20: mol_type = other RNA
gccctgcaggggagtgagca

SEQ ID NO: 267 - RNA, 20 nt, synthetic construct
  source 1..20: mol_type = other RNA
gccctgggcctggaagaagc

SEQ ID NO: 268 - RNA, 20 nt, synthetic construct
  source 1..20: mol_type = other RNA
gccgcaatacctttatggga

SEQ ID NO: 269 - RNA, 20 nt, synthetic construct
  source 1..20: mol_type = other RNA
gcctaggcaaaagaatcccg

SEQ ID NO: 270 - RNA, 20 nt, synthetic construct
  source 1..20: mol_type = other RNA
gcctaggcttaaggggctaa

SEQ ID NO: 271 - RNA, 20 nt, synthetic construct
  source 1..20: mol_type = other RNA
gcctccatgtcgagtcgctt

SEQ ID NO: 272 - RNA, 20 nt, synthetic construct
  source 1..20: mol_type = other RNA
gcctcccgtcttgtaaggac

SEQ ID NO: 273 - RNA, 20 nt, synthetic construct
  source 1..20: mol_type = other RNA
gcctggaagaagccctccct

SEQ ID NO: 274 - RNA, 20 nt, synthetic construct
  source 1..20: mol_type = other RNA
gcgactcgacatggaggcga

SEQ ID NO: 275 - RNA, 20 nt, synthetic construct
  source 1..20: mol_type = other RNA
gcgaggaggaaaggagggag

SEQ ID NO: 276 - RNA, 20 nt, synthetic construct
  source 1..20: mol_type = other RNA
gcgatgacgagatcacgcga

SEQ ID NO: 277 - RNA, 20 nt, synthetic construct
  source 1..20: mol_type = other RNA
gcgggattcttttgcctagg

SEQ ID NO: 278 - RNA, 20 nt, synthetic construct
  source 1..20: mol_type = other RNA
gcggtccttacaagacggga

SEQ ID NO: 279 - RNA, 20 nt, synthetic construct
  source 1..20: mol_type = other RNA
gcgtgatctcgtcatcgcct

SEQ ID NO: 280 - RNA, 20 nt, synthetic construct
  source 1..20: mol_type = other RNA
gcgttgccctgcaggggagt

SEQ ID NO: 281 - RNA, 20 nt, synthetic construct
  source 1..20: mol_type = other RNA
gctaacttggtccctgggcg

SEQ ID NO: 282 - RNA, 20 nt, synthetic construct
  source 1..20: mol_type = other RNA
gctcactcccctgcagggca

SEQ ID NO: 283 - RNA, 20 nt, synthetic construct
  source 1..20: mol_type = other RNA
gctgcctcccgtcttgtaag

SEQ ID NO: 284 - RNA, 20 nt, synthetic construct
  source 1..20: mol_type = other RNA
gctgctcactcccctgcagg

SEQ ID NO: 285 - RNA, 20 nt, synthetic construct
  source 1..20: mol_type = other RNA
gcttaaggggctaacttggt

SEQ ID NO: 286 - RNA, 20 nt, synthetic construct
  source 1..20: mol_type = other RNA
gcttctcgattatgggcggg

SEQ ID NO: 287 - RNA, 20 nt, synthetic construct
  source 1..20: mol_type = other RNA
gcttcttccaggcccagggc

SEQ ID NO: 288 - RNA, 20 nt, synthetic construct
  source 1..20: mol_type = other RNA
ggaaaggagggagggcttct

SEQ ID NO: 289 - RNA, 20 nt, synthetic construct
  source 1..20: mol_type = other RNA
ggaagaagccctccctcctt

SEQ ID NO: 290 - RNA, 20 nt, synthetic construct
  source 1..20: mol_type = other RNA
ggaccaagttagccccttaa

SEQ ID NO: 291 - RNA, 20 nt, synthetic construct
  source 1..20: mol_type = other RNA
ggaccgccctgggcctggaa

SEQ ID NO: 292 - RNA, 20 nt, synthetic construct
  source 1..20: mol_type = other RNA
ggaggaaaggagggagggct

SEQ ID NO: 293 - RNA, 20 nt, synthetic construct
  source 1..20: mol_type = other RNA
ggaggcagcagagaactccc

SEQ ID NO: 294 - RNA, 20 nt, synthetic construct
  source 1..20: mol_type = other RNA
ggaggcgatgacgagatcac

SEQ ID NO: 295 - RNA, 20 nt, synthetic construct
  source 1..20: mol_type = other RNA
ggagggagggcttcttccag

SEQ ID NO: 296 - RNA, 20 nt, synthetic construct
  source 1..20: mol_type = other RNA
ggagggcttcttccaggccc

SEQ ID NO: 297 - RNA, 20 nt, synthetic construct
  source 1..20: mol_type = other RNA
ggaggggagtgccgcaatac

SEQ ID NO: 298 - RNA, 20 nt, synthetic construct
  source 1..20: mol_type = other RNA
ggagtcgcccctcaaatctt

SEQ ID NO: 299 - RNA, 20 nt, synthetic construct
  source 1..20: mol_type = other RNA
ggagtgagcagctgtaagat

SEQ ID NO: 300 - RNA, 20 nt, synthetic construct
  source 1..20: mol_type = other RNA
ggagtgccgcaataccttta

SEQ ID NO: 301 - RNA, 20 nt, synthetic construct
  source 1..20: mol_type = other RNA
ggagttctctgctgcctccc

SEQ ID NO: 302 - RNA, 20 nt, synthetic construct
  source 1..20: mol_type = other RNA
ggattcttttgcctaggctt

SEQ ID NO: 303 - RNA, 20 nt, synthetic construct
  source 1..20: mol_type = other RNA
ggcaaaagaatcccgcccat

SEQ ID NO: 304 - RNA, 20 nt, synthetic construct
  source 1..20: mol_type = other RNA
ggcaacgcccagggaccaag

SEQ ID NO: 305 - RNA, 20 nt, synthetic construct
  source 1..20: mol_type = other RNA
ggcagcagagaactcccata

SEQ ID NO: 306 - RNA, 20 nt, synthetic construct
  source 1..20: mol_type = other RNA
ggcccagggcggtccttaca

SEQ ID NO: 307 - RNA, 20 nt, synthetic construct
  source 1..20: mol_type = other RNA
ggcctggaagaagccctccc

SEQ ID NO: 308 - RNA, 20 nt, synthetic construct
  source 1..20: mol_type = other RNA
ggcgatgacgagatcacgcg

SEQ ID NO: 309 - RNA, 20 nt, synthetic construct
  source 1..20: mol_type = other RNA
ggcgggattcttttgcctag

SEQ ID NO: 310 - RNA, 20 nt, synthetic construct
  source 1..20: mol_type = other RNA
ggcggtccttacaagacggg

SEQ ID NO: 311 - RNA, 20 nt, synthetic construct
  source 1..20: mol_type = other RNA
ggcgttgccctgcaggggag

SEQ ID NO: 312 - RNA, 20 nt, synthetic construct
  source 1..20: mol_type = other RNA
ggctaacttggtccctgggc

SEQ ID NO: 313 - RNA, 20 nt, synthetic construct
  source 1..20: mol_type = other RNA
ggcttaaggggctaacttgg

SEQ ID NO: 314 - RNA, 20 nt, synthetic construct
  source 1..20: mol_type = other RNA
ggcttcttccaggcccaggg

SEQ ID NO: 315 - RNA, 20 nt, synthetic construct
  source 1..20: mol_type = other RNA
gggaccaagttagcccctta

SEQ ID NO: 316 - RNA, 20 nt, synthetic construct
  source 1..20: mol_type = other RNA
gggaggcagcagagaactcc

SEQ ID NO: 317 - RNA, 20 nt, synthetic construct
  source 1..20: mol_type = other RNA
gggagggcttcttccaggcc

SEQ ID NO: 318 - RNA, 20 nt, synthetic construct
  source 1..20: mol_type = other RNA
gggaggggagtgccgcaata

SEQ ID NO: 319 - RNA, 20 nt, synthetic construct
  source 1..20: mol_type = other RNA
gggagtgagcagctgtaaga

SEQ ID NO: 320 - RNA, 20 nt, synthetic construct
  source 1..20: mol_type = other RNA
gggagtgccgcaataccttt

SEQ ID NO: 321 - RNA, 20 nt, synthetic construct
  source 1..20: mol_type = other RNA
gggagttctctgctgcctcc

SEQ ID NO: 322 - RNA, 20 nt, synthetic construct
  source 1..20: mol_type = other RNA
gggattcttttgcctaggct

SEQ ID NO: 323 - RNA, 20 nt, synthetic construct
  source 1..20: mol_type = other RNA
gggcaacgcccagggaccaa

SEQ ID NO: 324 - RNA, 20 nt, synthetic construct
  source 1..20: mol_type = other RNA
gggcctggaagaagccctcc

SEQ ID NO: 325 - RNA, 20 nt, synthetic construct
  source 1..20: mol_type = other RNA
gggcgggattcttttgccta

SEQ ID NO: 326 - RNA, 20 nt, synthetic construct
  source 1..20: mol_type = other RNA
gggcggtccttacaagacgg

SEQ ID NO: 327 - RNA, 20 nt, synthetic construct
  source 1..20: mol_type = other RNA
gggcgttgccctgcagggga

SEQ ID NO: 328 - RNA, 20 nt, synthetic construct
  source 1..20: mol_type = other RNA
gggctaacttggtccctggg

SEQ ID NO: 329 - RNA, 20 nt, synthetic construct
  source 1..20: mol_type = other RNA
gggcttcttccaggcccagg

SEQ ID NO: 330 - RNA, 20 nt, synthetic construct
  source 1..20: mol_type = other RNA
ggggaggggagtgccgcaat

SEQ ID NO: 331 - RNA, 20 nt, synthetic construct
  source 1..20: mol_type = other RNA
ggggagtgagcagctgtaag

SEQ ID NO: 332 - RNA, 20 nt, synthetic construct
  source 1..20: mol_type = other RNA
ggggagtgccgcaatacctt

SEQ ID NO: 333 - RNA, 20 nt, synthetic construct
  source 1..20: mol_type = other RNA
ggggctaacttggtccctgg

SEQ ID NO: 334 - RNA, 20 nt, synthetic construct
  source 1..20: mol_type = other RNA
ggtccctgggcgttgccctg

SEQ ID NO: 335 - RNA, 20 nt, synthetic construct
  source 1..20: mol_type = other RNA
ggtccttacaagacgggagg

SEQ ID NO: 336 - RNA, 20 nt, synthetic construct
  source 1..20: mol_type = other RNA
gtaaggaccgccctgggcct

SEQ ID NO: 337 - RNA, 20 nt, synthetic construct
  source 1..20: mol_type = other RNA
gtcatcgcctccatgtcgag

SEQ ID NO: 338 - RNA, 20 nt, synthetic construct
  source 1..20: mol_type = other RNA
gtccctgggcgttgccctgc

SEQ ID NO: 339 - RNA, 20 nt, synthetic construct
  source 1..20: mol_type = other RNA
gtccttacaagacgggaggc

SEQ ID NO: 340 - RNA, 20 nt, synthetic construct
  source 1..20: mol_type = other RNA
gtcgagtcgcttctcgatta

SEQ ID NO: 341 - RNA, 20 nt, synthetic construct
  source 1..20: mol_type = other RNA
gtcgcccctcaaatcttaca

SEQ ID NO: 342 - RNA, 20 nt, synthetic construct
  source 1..20: mol_type = other RNA
gtcgcttctcgattatgggc

SEQ ID NO: 343 - RNA, 20 nt, synthetic construct
  source 1..20: mol_type = other RNA
gtcttgtaaggaccgccctg

SEQ ID NO: 344 - RNA, 20 nt, synthetic construct
  source 1..20: mol_type = other RNA
gtgagcagctgtaagatttg

SEQ ID NO: 345 - RNA, 20 nt, synthetic construct
  source 1..20: mol_type = other RNA
gtgatctcgtcatcgcctcc

SEQ ID NO: 346 - RNA, 20 nt, synthetic construct
  source 1..20: mol_type = other RNA
gtgccgcaatacctttatgg

SEQ ID NO: 347 - RNA, 20 nt, synthetic construct
  source 1..20: mol_type = other RNA
gttagccccttaagcctagg

SEQ ID NO: 348 - RNA, 20 nt, synthetic construct
  source 1..20: mol_type = other RNA
gttctctgctgcctcccgtc

SEQ ID NO: 349 - RNA, 20 nt, synthetic construct
  source 1..20: mol_type = other RNA
gttgccctgcaggggagtga

SEQ ID NO: 350 - RNA, 20 nt, synthetic construct
  source 1..20: mol_type = other RNA
taacttggtccctgggcgtt

SEQ ID NO: 351 - RNA, 20 nt, synthetic construct
  source 1..20: mol_type = other RNA
taagcctaggcaaaagaatc

SEQ ID NO: 352 - RNA, 20 nt, synthetic construct
  source 1..20: mol_type = other RNA
taaggaccgccctgggcctg

SEQ ID NO: 353 - RNA, 20 nt, synthetic construct
  source 1..20: mol_type = other RNA
taaggggctaacttggtccc

SEQ ID NO: 354 - RNA, 20 nt, synthetic construct
  source 1..20: mol_type = other RNA
taatcgagaagcgactcgac

SEQ ID NO: 355 - RNA, 20 nt, synthetic construct
  source 1..20: mol_type = other RNA
tacaagacgggaggcagcag

SEQ ID NO: 356 - RNA, 20 nt, synthetic construct
  source 1..20: mol_type = other RNA
tacagctgctcactcccctg

SEQ ID NO: 357 - RNA, 20 nt, synthetic construct
  source 1..20: mol_type = other RNA
tacctttatgggagttctct

SEQ ID NO: 358 - RNA, 20 nt, synthetic construct
  source 1..20: mol_type = other RNA
tagccccttaagcctaggca

SEQ ID NO: 359 - RNA, 20 nt, synthetic construct
  source 1..20: mol_type = other RNA
taggcaaaagaatcccgccc

SEQ ID NO: 360 - RNA, 20 nt, synthetic construct
  source 1..20: mol_type = other RNA
taggcttaaggggctaactt

SEQ ID NO: 361 - RNA, 20 nt, synthetic construct
  source 1..20: mol_type = other RNA
tatgggagttctctgctgcc

SEQ ID NO: 362 - RNA, 20 nt, synthetic construct
  source 1..20: mol_type = other RNA
tatgggcgggattcttttgc

SEQ ID NO: 363 - RNA, 20 nt, synthetic construct
  source 1..20: mol_type = other RNA
tcaaatcttacagctgctca

SEQ ID NO: 364 - RNA, 20 nt, synthetic construct
  source 1..20: mol_type = other RNA
tcacgcgaggaggaaaggag

SEQ ID NO: 365 - RNA, 20 nt, synthetic construct
  source 1..20: mol_type = other RNA
tcactcccctgcagggcaac

SEQ ID NO: 366 - RNA, 20 nt, synthetic construct
  source 1..20: mol_type = other RNA
tcatcgcctccatgtcgagt

SEQ ID NO: 367 - RNA, 20 nt, synthetic construct
  source 1..20: mol_type = other RNA
tccaggcccagggcggtcct

SEQ ID NO: 368 - RNA, 20 nt, synthetic construct
  source 1..20: mol_type = other RNA
tccatgtcgagtcgcttctc

SEQ ID NO: 369 - RNA, 20 nt, synthetic construct
  source 1..20: mol_type = other RNA
tcccataaaggtattgcggc

SEQ ID NO: 370 - RNA, 20 nt, synthetic construct
  source 1..20: mol_type = other RNA
tcccctgcagggcaacgccc

SEQ ID NO: 371 - RNA, 20 nt, synthetic construct
  source 1..20: mol_type = other RNA
tcccgcccataatcgagaag

SEQ ID NO: 372 - RNA, 20 nt, synthetic construct
  source 1..20: mol_type = other RNA
tcccgtcttgtaaggaccgc

SEQ ID NO: 373 - RNA, 20 nt, synthetic construct
  source 1..20: mol_type = other RNA
tccctcctttcctcctcgcg

SEQ ID NO: 374 - RNA, 20 nt, synthetic construct
  source 1..20: mol_type = other RNA
tccctgggcgttgccctgca

SEQ ID NO: 375 - RNA, 20 nt, synthetic construct
  source 1..20: mol_type = other RNA
tcctcctcgcgtgatctcgt

SEQ ID NO: 376 - RNA, 20 nt, synthetic construct
  source 1..20: mol_type = other RNA
tcctcgcgtgatctcgtcat

SEQ ID NO: 377 - RNA, 20 nt, synthetic construct
  source 1..20: mol_type = other RNA
tccttacaagacgggaggca

SEQ ID NO: 378 - RNA, 20 nt, synthetic construct
  source 1..20: mol_type = other RNA
tcctttcctcctcgcgtgat

SEQ ID NO: 379 - RNA, 20 nt, synthetic construct
  source 1..20: mol_type = other RNA
tcgacatggaggcgatgacg

SEQ ID NO: 380 - RNA, 20 nt, synthetic construct
  source 1..20: mol_type = other RNA
tcgagaagcgactcgacatg

SEQ ID NO: 381 - RNA, 20 nt, synthetic construct
  source 1..20: mol_type = other RNA
tcgagtcgcttctcgattat

SEQ ID NO: 382 - RNA, 20 nt, synthetic construct
  source 1..20: mol_type = other RNA
tcgattatgggcgggattct

SEQ ID NO: 383 - RNA, 20 nt, synthetic construct
  source 1..20: mol_type = other RNA
tcgcccctcaaatcttacag

SEQ ID NO: 384 - RNA, 20 nt, synthetic construct
  source 1..20: mol_type = other RNA
tcgcctccatgtcgagtcgc

SEQ ID NO: 385 - RNA, 20 nt, synthetic construct
  source 1..20: mol_type = other RNA
tcgcgtgatctcgtcatcgc

SEQ ID NO: 386 - RNA, 20 nt, synthetic construct
  source 1..20: mol_type = other RNA
tcgcttctcgattatgggcg

SEQ ID NO: 387 - RNA, 20 nt, synthetic construct
  source 1..20: mol_type = other RNA
tcgtcatcgcctccatgtcg

SEQ ID NO: 388 - RNA, 20 nt, synthetic construct
  source 1..20: mol_type = other RNA
tctcgattatgggcgggatt

SEQ ID NO: 389 - RNA, 20 nt, synthetic construct
  source 1..20: mol_type = other RNA
tctcgtcatcgcctccatgt

SEQ ID NO: 390 - RNA, 20 nt, synthetic construct
  source 1..20: mol_type = other RNA
tctctgctgcctcccgtctt

SEQ ID NO: 391 - RNA, 20 nt, synthetic construct
  source 1..20: mol_type = other RNA
tctgctgcctcccgtcttgt

SEQ ID NO: 392 - RNA, 20 nt, synthetic construct
  source 1..20: mol_type = other RNA
tcttacagctgctcactccc

SEQ ID NO: 393 - RNA, 20 nt, synthetic construct
  source 1..20: mol_type = other RNA
tcttccaggcccagggcggt

SEQ ID NO: 394 - RNA, 20 nt, synthetic construct
  source 1..20: mol_type = other RNA
tcttgtaaggaccgccctgg

SEQ ID NO: 395 - RNA, 20 nt, synthetic construct
  source 1..20: mol_type = other RNA
tcttttgcctaggcttaagg

SEQ ID NO: 396 - RNA, 20 nt, synthetic construct
  source 1..20: mol_type = other RNA
tgacgagatcacgcgaggag

SEQ ID NO: 397 - RNA, 20 nt, synthetic construct
  source 1..20: mol_type = other RNA
tgagcagctgtaagatttga

SEQ ID NO: 398 - RNA, 20 nt, synthetic construct
  source 1..20: mol_type = other RNA
tgatctcgtcatcgcctcca

SEQ ID NO: 399 - RNA, 20 nt, synthetic construct
  source 1..20: mol_type = other RNA
tgcagggcaacgcccaggga

SEQ ID NO: 400 - RNA, 20 nt, synthetic construct
  source 1..20: mol_type = other RNA
tgcaggggagtgagcagctg

SEQ ID NO: 401 - RNA, 20 nt, synthetic construct
  source 1..20: mol_type = other RNA
tgccctgcaggggagtgagc

SEQ ID NO: 402 - RNA, 20 nt, synthetic construct
  source 1..20: mol_type = other RNA
tgccgcaatacctttatggg

SEQ ID NO: 403 - RNA, 20 nt, synthetic construct
  source 1..20: mol_type = other RNA
tgcctaggcttaaggggcta

SEQ ID NO: 404 - RNA, 20 nt, synthetic construct
  source 1..20: mol_type = other RNA
tgcctcccgtcttgtaagga

SEQ ID NO: 405 - RNA, 20 nt, synthetic construct
  source 1..20: mol_type = other RNA
tgctcactcccctgcagggc

SEQ ID NO: 406 - RNA, 20 nt, synthetic construct
  source 1..20: mol_type = other RNA
tgctgcctcccgtcttgtaa

SEQ ID NO: 407 - RNA, 20 nt, synthetic construct
  source 1..20: mol_type = other RNA
tggaagaagccctccctcct

SEQ ID NO: 408 - RNA, 20 nt, synthetic construct
  source 1..20: mol_type = other RNA
tggaggcgatgacgagatca

SEQ ID NO: 409 - RNA, 20 nt, synthetic construct
  source 1..20: mol_type = other RNA
tgggagttctctgctgcctc

SEQ ID NO: 410 - RNA, 20 nt, synthetic construct
  source 1..20: mol_type = other RNA
tgggcctggaagaagccctc

SEQ ID NO: 411 - RNA, 20 nt, synthetic construct
  source 1..20: mol_type = other RNA
tgggcgggattcttttgcct

SEQ ID NO: 412 - RNA, 20 nt, synthetic construct
  source 1..20: mol_type = other RNA
tgggcgttgccctgcagggg

SEQ ID NO: 413 - RNA, 20 nt, synthetic construct
  source 1..20: mol_type = other RNA
tggtccctgggcgttgccct

SEQ ID NO: 414 - RNA, 20 nt, synthetic construct
  source 1..20: mol_type = other RNA
tgtaaggaccgccctgggcc

SEQ ID NO: 415 - RNA, 20 nt, synthetic construct
  source 1..20: mol_type = other RNA
tgtcgagtcgcttctcgatt

SEQ ID NO: 416 - RNA, 20 nt, synthetic construct
  source 1..20: mol_type = other RNA
ttaagcctaggcaaaagaat

SEQ ID NO: 417 - RNA, 20 nt, synthetic construct
  source 1..20: mol_type = other RNA
ttaaggggctaacttggtcc

SEQ ID NO: 418 - RNA, 20 nt, synthetic construct
  source 1..20: mol_type = other RNA
ttacaagacgggaggcagca

SEQ ID NO: 419 - RNA, 20 nt, synthetic construct
  source 1..20: mol_type = other RNA
ttacagctgctcactcccct

SEQ ID NO: 420 - RNA, 20 nt, synthetic construct
  source 1..20: mol_type = other RNA
ttagccccttaagcctaggc

SEQ ID NO: 421 - RNA, 20 nt, synthetic construct
  source 1..20: mol_type = other RNA
ttatgggagttctctgctgc

SEQ ID NO: 422 - RNA, 20 nt, synthetic construct
  source 1..20: mol_type = other RNA
ttatgggcgggattcttttg

SEQ ID NO: 423 - RNA, 20 nt, synthetic construct
  source 1..20: mol_type = other RNA
ttccaggcccagggcggtcc

SEQ ID NO: 424 - RNA, 20 nt, synthetic construct
  source 1..20: mol_type = other RNA
ttcctcctcgcgtgatctcg

SEQ ID NO: 425 - RNA, 20 nt, synthetic construct
  source 1..20: mol_type = other RNA
ttctcgattatgggcgggat

SEQ ID NO: 426 - RNA, 20 nt, synthetic construct
  source 1..20: mol_type = other RNA
ttctctgctgcctcccgtct

SEQ ID NO: 427 - RNA, 20 nt, synthetic construct
  source 1..20: mol_type = other RNA
ttcttccaggcccagggcgg

SEQ ID NO: 428 - RNA, 20 nt, synthetic construct
  source 1..20: mol_type = other RNA
ttcttttgcctaggcttaag

SEQ ID NO: 429 - RNA, 20 nt, synthetic construct
  source 1..20: mol_type = other RNA
ttgccctgcaggggagtgag

SEQ ID NO: 430 - RNA, 20 nt, synthetic construct
  source 1..20: mol_type = other RNA
ttgcctaggcttaaggggct

SEQ ID NO: 431 - RNA, 20 nt, synthetic construct
  source 1..20: mol_type = other RNA
ttggtccctgggcgttgccc

SEQ ID NO: 432 - RNA, 20 nt, synthetic construct
  source 1..20: mol_type = other RNA
ttgtaaggaccgccctgggc

SEQ ID NO: 433 - RNA, 20 nt, synthetic construct
  source 1..20: mol_type = other RNA
tttatgggagttctctgctg

SEQ ID NO: 434 - RNA, 20 nt, synthetic construct
  source 1..20: mol_type = other RNA
tttcctcctcgcgtgatctc

SEQ ID NO: 435 - RNA, 20 nt, synthetic construct
  source 1..20: mol_type = other RNA
tttgcctaggcttaaggggc

SEQ ID NO: 436 - RNA, 20 nt, synthetic construct
  source 1..20: mol_type = other RNA
ttttgcctaggcttaagggg

SEQ ID NO: 437 - RNA, 21 nt, synthetic construct
  source 1..21: mol_type = other RNA
aaaagaatcccgcccataatc

SEQ ID NO: 438 - RNA, 21 nt, synthetic construct
  source 1..21: mol_type = other RNA
aaagaatcccgcccataatcg

SEQ ID NO: 439 - RNA, 21 nt, synthetic construct
  source 1..21: mol_type = other RNA
aaaggagggagggcttcttcc

SEQ ID NO: 440 - RNA, 21 nt, synthetic construct
  source 1..21: mol_type = other RNA
aaatcttacagctgctcactc

SEQ ID NO: 441 - RNA, 21 nt, synthetic construct
  source 1..21: mol_type = other RNA
aacgcccagggaccaagttag

SEQ ID NO: 442 - RNA, 21 nt, synthetic construct
  source 1..21: mol_type = other RNA
aactcccataaaggtattgcg

SEQ ID NO: 443 - RNA, 21 nt, synthetic construct
  source 1..21: mol_type = other RNA
aacttggtccctgggcgttgc

SEQ ID NO: 444 - RNA, 21 nt, synthetic construct
  source 1..21: mol_type = other RNA
aagaagccctccctcctttcc

SEQ ID NO: 445 - RNA, 21 nt, synthetic construct
  source 1..21: mol_type = other RNA
aagaatcccgcccataatcga

SEQ ID NO: 446 - RNA, 21 nt, synthetic construct
  source 1..21: mol_type = other RNA
aagacgggaggcagcagagaa

SEQ ID NO: 447 - RNA, 21 nt, synthetic construct
  source 1..21: mol_type = other RNA
aagccctccctcctttcctcc

SEQ ID NO: 448 - RNA, 21 nt, synthetic construct
  source 1..21: mol_type = other RNA
aagcctaggcaaaagaatccc

SEQ ID NO: 449 - RNA, 21 nt, synthetic construct
  source 1..21: mol_type = other RNA
aagcgactcgacatggaggcg

SEQ ID NO: 450 - RNA, 21 nt, synthetic construct
  source 1..21: mol_type = other RNA
aaggaccgccctgggcctgga

SEQ ID NO: 451 - RNA, 21 nt, synthetic construct
  source 1..21: mol_type = other RNA
aaggagggagggcttcttcca

SEQ ID NO: 452 - RNA, 21 nt, synthetic construct
  source 1..21: mol_type = other RNA
aaggggctaacttggtccctg

SEQ ID NO: 453 - RNA, 21 nt, synthetic construct
  source 1..21: mol_type = other RNA
aagttagccccttaagcctag

SEQ ID NO: 454 - RNA, 21 nt, synthetic construct
  source 1..21: mol_type = other RNA
aatacctttatgggagttctc

SEQ ID NO: 455 - RNA, 21 nt, synthetic construct
  source 1..21: mol_type = other RNA
aatcccgcccataatcgagaa

SEQ ID NO: 456 - RNA, 21 nt, synthetic construct
  source 1..21: mol_type = other RNA
aatcgagaagcgactcgacat

SEQ ID NO: 457 - RNA, 21 nt, synthetic construct
  source 1..21: mol_type = other RNA
aatcttacagctgctcactcc

SEQ ID NO: 458 - RNA, 21 nt, synthetic construct
  source 1..21: mol_type = other RNA
acaagacgggaggcagcagag

SEQ ID NO: 459 - RNA, 21 nt, synthetic construct
  source 1..21: mol_type = other RNA
acagctgctcactcccctgca

SEQ ID NO: 460 - RNA, 21 nt, synthetic construct
  source 1..21: mol_type = other RNA
acatggaggcgatgacgagat

SEQ ID NO: 461 - RNA, 21 nt, synthetic construct
  source 1..21: mol_type = other RNA
accaagttagccccttaagcc

SEQ ID NO: 462 - RNA, 21 nt, synthetic construct
  source 1..21: mol_type = other RNA
accgccctgggcctggaagaa

SEQ ID NO: 463 - RNA, 21 nt, synthetic construct
  source 1..21: mol_type = other RNA
acctttatgggagttctctgc

SEQ ID NO: 464 - RNA, 21 nt, synthetic construct
  source 1..21: mol_type = other RNA
acgagatcacgcgaggaggaa

SEQ ID NO: 465 - RNA, 21 nt, synthetic construct
  source 1..21: mol_type = other RNA
acgcccagggaccaagttagc

SEQ ID NO: 466 - RNA, 21 nt, synthetic construct
  source 1..21: mol_type = other RNA
acgcgaggaggaaaggaggga

SEQ ID NO: 467 - RNA, 21 nt, synthetic construct
  source 1..21: mol_type = other RNA
acgggaggcagcagagaactc

SEQ ID NO: 468 - RNA, 21 nt, synthetic construct
  source 1..21: mol_type = other RNA
actcccataaaggtattgcgg

SEQ ID NO: 469 - RNA, 21 nt, synthetic construct
  source 1..21: mol_type = other RNA
actcccctgcagggcaacgcc

SEQ ID NO: 470 - RNA, 21 nt, synthetic construct
  source 1..21: mol_type = other RNA
actcgacatggaggcgatgac

SEQ ID NO: 471 - RNA, 21 nt, synthetic construct
  source 1..21: mol_type = other RNA
acttggtccctgggcgttgcc

SEQ ID NO: 472 - RNA, 21 nt, synthetic construct
  source 1..21: mol_type = other RNA
agaactcccataaaggtattg

SEQ ID NO: 473 - RNA, 21 nt, synthetic construct
  source 1..21: mol_type = other RNA
agaagccctccctcctttcct

SEQ ID NO: 474 - RNA, 21 nt, synthetic construct
  source 1..21: mol_type = other RNA
agaagcgactcgacatggagg

SEQ ID NO: 475 - RNA, 21 nt, synthetic construct
  source 1..21: mol_type = other RNA
agaatcccgcccataatcgag

SEQ ID NO: 476 - RNA, 21 nt, synthetic construct
  source 1..21: mol_type = other RNA
agacgggaggcagcagagaac

SEQ ID NO: 477 - RNA, 21 nt, synthetic construct
  source 1..21: mol_type = other RNA
agagaactcccataaaggtat

SEQ ID NO: 478 - RNA, 21 nt, synthetic construct
  source 1..21: mol_type = other RNA
agatcacgcgaggaggaaagg

SEQ ID NO: 479 - RNA, 21 nt, synthetic construct
  source 1..21: mol_type = other RNA
agcagagaactcccataaagg

SEQ ID NO: 480 - RNA, 21 nt, synthetic construct
  source 1..21: mol_type = other RNA
agcagctgtaagatttgaggg

SEQ ID NO: 481 - RNA, 21 nt, synthetic construct
  source 1..21: mol_type = other RNA
agccccttaagcctaggcaaa

SEQ ID NO: 482 - RNA, 21 nt, synthetic construct
  source 1..21: mol_type = other RNA
agccctccctcctttcctcct

SEQ ID NO: 483 - RNA, 21 nt, synthetic construct
  source 1..21: mol_type = other RNA
agcctaggcaaaagaatcccg

SEQ ID NO: 484 - RNA, 21 nt, synthetic construct
  source 1..21: mol_type = other RNA
agcgactcgacatggaggcga

SEQ ID NO: 485 - RNA, 21 nt, synthetic construct
  source 1..21: mol_type = other RNA
agctgctcactcccctgcagg

SEQ ID NO: 486 - RNA, 21 nt, synthetic construct
  source 1..21: mol_type = other RNA
aggaaaggagggagggcttct

SEQ ID NO: 487 - RNA, 21 nt, synthetic construct
  source 1..21: mol_type = other RNA
aggaccgccctgggcctggaa

SEQ ID NO: 488 - RNA, 21 nt, synthetic construct
  source 1..21: mol_type = other RNA
aggaggaaaggagggagggct

SEQ ID NO: 489 - RNA, 21 nt, synthetic construct
  source 1..21: mol_type = other RNA
aggagggagggcttcttccag

SEQ ID NO: 490 - RNA, 21 nt, synthetic construct
  source 1..21: mol_type = other RNA
aggcaaaagaatcccgcccat

SEQ ID NO: 491 - RNA, 21 nt, synthetic construct
  source 1..21: mol_type = other RNA
aggcagcagagaactcccata

SEQ ID NO: 492 - RNA, 21 nt, synthetic construct
  source 1..21: mol_type = other RNA
aggcccagggcggtccttaca

SEQ ID NO: 493 - RNA, 21 nt, synthetic construct
  source 1..21: mol_type = other RNA
aggcgatgacgagatcacgcg

SEQ ID NO: 494 - RNA, 21 nt, synthetic construct
  source 1..21: mol_type = other RNA
aggcttaaggggctaacttgg

SEQ ID NO: 495 - RNA, 21 nt, synthetic construct
  source 1..21: mol_type = other RNA
agggaccaagttagcccctta

SEQ ID NO: 496 - RNA, 21 nt, synthetic construct
  source 1..21: mol_type = other RNA
agggagggcttcttccaggcc

SEQ ID NO: 497 - RNA, 21 nt, synthetic construct
  source 1..21: mol_type = other RNA
agggcaacgcccagggaccaa

SEQ ID NO: 498 - RNA, 21 nt, synthetic construct
  source 1..21: mol_type = other RNA
agggcggtccttacaagacgg

SEQ ID NO: 499 - RNA, 21 nt, synthetic construct
  source 1..21: mol_type = other RNA
agggcttcttccaggcccagg

SEQ ID NO: 500 - RNA, 21 nt, synthetic construct
  source 1..21: mol_type = other RNA
aggggagtgagcagctgtaag

SEQ ID NO: 501 - RNA, 21 nt, synthetic construct
  source 1..21: mol_type = other RNA
aggggagtgccgcaatacctt

SEQ ID NO: 502 - RNA, 21 nt, synthetic construct
  source 1..21: mol_type = other RNA
aggggctaacttggtccctgg

SEQ ID NO: 503 - RNA, 21 nt, synthetic construct
  source 1..21: mol_type = other RNA
agtcgcccctcaaatcttaca

SEQ ID NO: 504 - RNA, 21 nt, synthetic construct
  source 1..21: mol_type = other RNA
agtcgcttctcgattatgggc

SEQ ID NO: 505 - RNA, 21 nt, synthetic construct
  source 1..21: mol_type = other RNA
agtgagcagctgtaagatttg

SEQ ID NO: 506 - RNA, 21 nt, synthetic construct
  source 1..21: mol_type = other RNA
agtgccgcaatacctttatgg

SEQ ID NO: 507 - RNA, 21 nt, synthetic construct
  source 1..21: mol_type = other RNA
agttagccccttaagcctagg

SEQ ID NO: 508 - RNA, 21 nt, synthetic construct
  source 1..21: mol_type = other RNA
agttctctgctgcctcccgtc

SEQ ID NO: 509 - RNA, 21 nt, synthetic construct
  source 1..21: mol_type = other RNA
ataatcgagaagcgactcgac

SEQ ID NO: 510 - RNA, 21 nt, synthetic construct
  source 1..21: mol_type = other RNA
atacctttatgggagttctct

SEQ ID NO: 511 - RNA, 21 nt, synthetic construct
  source 1..21: mol_type = other RNA
atcacgcgaggaggaaaggag

SEQ ID NO: 512 - RNA, 21 nt, synthetic construct
  source 1..21: mol_type = other RNA
atcccgcccataatcgagaag

SEQ ID NO: 513 - RNA, 21 nt, synthetic construct
  source 1..21: mol_type = other RNA
atcgagaagcgactcgacatg

SEQ ID NO: 514 - RNA, 21 nt, synthetic construct
  source 1..21: mol_type = other RNA
atcgcctccatgtcgagtcgc

SEQ ID NO: 515 - RNA, 21 nt, synthetic construct
  source 1..21: mol_type = other RNA
atctcgtcatcgcctccatgt

SEQ ID NO: 516 - RNA, 21 nt, synthetic construct
  source 1..21: mol_type = other RNA
atcttacagctgctcactccc

SEQ ID NO: 517 - RNA, 21 nt, synthetic construct
  source 1..21: mol_type = other RNA
atgacgagatcacgcgaggag

SEQ ID NO: 518 - RNA, 21 nt, synthetic construct
  source 1..21: mol_type = other RNA
atggaggcgatgacgagatca

SEQ ID NO: 519 - RNA, 21 nt, synthetic construct
  source 1..21: mol_type = other RNA
atgggagttctctgctgcctc

SEQ ID NO: 520 - RNA, 21 nt, synthetic construct
  source 1..21: mol_type = other RNA
atgggcgggattcttttgcct

SEQ ID NO: 521 - RNA, 21 nt, synthetic construct
  source 1..21: mol_type = other RNA
atgtcgagtcgcttctcgatt

SEQ ID NO: 522 - RNA, 21 nt, synthetic construct
  source 1..21: mol_type = other RNA
attatgggcgggattcttttg

SEQ ID NO: 523 - RNA, 21 nt, synthetic construct
  source 1..21: mol_type = other RNA
attcttttgcctaggcttaag

SEQ ID NO: 524 - RNA, 21 nt, synthetic construct
  source 1..21: mol_type = other RNA
caaaagaatcccgcccataat

SEQ ID NO: 525 - RNA, 21 nt, synthetic construct
  source 1..21: mol_type = other RNA
caaatcttacagctgctcact

SEQ ID NO: 526 - RNA, 21 nt, synthetic construct
  source 1..21: mol_type = other RNA
caacgcccagggaccaagtta

SEQ ID NO: 527 - RNA, 21 nt, synthetic construct
  source 1..21: mol_type = other RNA
caagacgggaggcagcagaga

SEQ ID NO: 528 - RNA, 21 nt, synthetic construct
  source 1..21: mol_type = other RNA
caagttagccccttaagccta

SEQ ID NO: 529 - RNA, 21 nt, synthetic construct
  source 1..21: mol_type = other RNA
caatacctttatgggagttct

SEQ ID NO: 530 - RNA, 21 nt, synthetic construct
  source 1..21: mol_type = other RNA
cacgcgaggaggaaaggaggg

SEQ ID NO: 531 - RNA, 21 nt, synthetic construct
  source 1..21: mol_type = other RNA
cactcccctgcagggcaacgc

SEQ ID NO: 532 - RNA, 21 nt, synthetic construct
  source 1..21: mol_type = other RNA
cagagaactcccataaaggta

SEQ ID NO: 533 - RNA, 21 nt, synthetic construct
  source 1..21: mol_type = other RNA
cagcagagaactcccataaag

SEQ ID NO: 534 - RNA, 21 nt, synthetic construct
  source 1..21: mol_type = other RNA
cagctgctcactcccctgcag

SEQ ID NO: 535 - RNA, 21 nt, synthetic construct
  source 1..21: mol_type = other RNA
caggcccagggcggtccttac

SEQ ID NO: 536 - RNA, 21 nt, synthetic construct
  source 1..21: mol_type = other RNA
cagggaccaagttagcccctt

SEQ ID NO: 537 - RNA, 21 nt, synthetic construct
  source 1..21: mol_type = other RNA
cagggcaacgcccagggacca

SEQ ID NO: 538 - RNA, 21 nt, synthetic construct
  source 1..21: mol_type = other RNA
cagggcggtccttacaagacg

SEQ ID NO: 539 - RNA, 21 nt, synthetic construct
  source 1..21: mol_type = other RNA
caggggagtgagcagctgtaa

SEQ ID NO: 540 - RNA, 21 nt, synthetic construct
  source 1..21: mol_type = other RNA
cataaaggtattgcggcactc

SEQ ID NO: 541 - RNA, 21 nt, synthetic construct
  source 1..21: mol_type = other RNA
cataatcgagaagcgactcga

SEQ ID NO: 542 - RNA, 21 nt, synthetic construct
  source 1..21: mol_type = other RNA
catcgcctccatgtcgagtcg

SEQ ID NO: 543 - RNA, 21 nt, synthetic construct
  source 1..21: mol_type = other RNA
catggaggcgatgacgagatc

SEQ ID NO: 544 - RNA, 21 nt, synthetic construct
  source 1..21: mol_type = other RNA
catgtcgagtcgcttctcgat

SEQ ID NO: 545 - RNA, 21 nt, synthetic construct
  source 1..21: mol_type = other RNA
ccaagttagccccttaagcct

SEQ ID NO: 546 - RNA, 21 nt, synthetic construct
  source 1..21: mol_type = other RNA
ccaggcccagggcggtcctta

SEQ ID NO: 547 - RNA, 21 nt, synthetic construct
  source 1..21: mol_type = other RNA
ccagggaccaagttagcccct

SEQ ID NO: 548 - RNA, 21 nt, synthetic construct
  source 1..21: mol_type = other RNA
ccagggcggtccttacaagac

SEQ ID NO: 549 - RNA, 21 nt, synthetic construct
  source 1..21: mol_type = other RNA
ccataaaggtattgcggcact

SEQ ID NO: 550 - RNA, 21 nt, synthetic construct
  source 1..21: mol_type = other RNA
ccataatcgagaagcgactcg

SEQ ID NO: 551 - RNA, 21 nt, synthetic construct
  source 1..21: mol_type = other RNA
ccatgtcgagtcgcttctcga

SEQ ID NO: 552 - RNA, 21 nt, synthetic construct
  source 1..21: mol_type = other RNA
cccagggaccaagttagcccc

SEQ ID NO: 553 - RNA, 21 nt, synthetic construct
  source 1..21: mol_type = other RNA
cccagggcggtccttacaaga

SEQ ID NO: 554 - RNA, 21 nt, synthetic construct
  source 1..21: mol_type = other RNA
cccataaaggtattgcggcac

SEQ ID NO: 555 - RNA, 21 nt, synthetic construct
  source 1..21: mol_type = other RNA
cccataatcgagaagcgactc

SEQ ID NO: 556 - RNA, 21 nt, synthetic construct
  source 1..21: mol_type = other RNA
cccctcaaatcttacagctgc

SEQ ID NO: 557 - RNA, 21 nt, synthetic construct
  source 1..21: mol_type = other RNA
cccctgcagggcaacgcccag

SEQ ID NO: 558 - RNA, 21 nt, synthetic construct
  source 1..21: mol_type = other RNA
ccccttaagcctaggcaaaag

SEQ ID NO: 559 - RNA, 21 nt, synthetic construct
  source 1..21: mol_type = other RNA
cccgcccataatcgagaagcg

SEQ ID NO: 560 - RNA, 21 nt, synthetic construct
  source 1..21: mol_type = other RNA
cccgtcttgtaaggaccgccc

SEQ ID NO: 561 - RNA, 21 nt, synthetic construct
  source 1..21: mol_type = other RNA
ccctcaaatcttacagctgct

SEQ ID NO: 562 - RNA, 21 nt, synthetic construct
  source 1..21: mol_type = other RNA
ccctccctcctttcctcctcg

SEQ ID NO: 563 - RNA, 21 nt, synthetic construct
  source 1..21: mol_type = other RNA
ccctcctttcctcctcgcgtg

SEQ ID NO: 564 - RNA, 21 nt, synthetic construct
  source 1..21: mol_type = other RNA
ccctgcagggcaacgcccagg

SEQ ID NO: 565 - RNA, 21 nt, synthetic construct
  source 1..21: mol_type = other RNA
ccctgcaggggagtgagcagc

SEQ ID NO: 566 - RNA, 21 nt, synthetic construct
  source 1..21: mol_type = other RNA
ccctgggcctggaagaagccc

SEQ ID NO: 567 - RNA, 21 nt, synthetic construct
  source 1..21: mol_type = other RNA
ccctgggcgttgccctgcagg

SEQ ID NO: 568 - RNA, 21 nt, synthetic construct
  source 1..21: mol_type = other RNA
cccttaagcctaggcaaaaga

SEQ ID NO: 569 - RNA, 21 nt, synthetic construct
  source 1..21: mol_type = other RNA
ccgcaatacctttatgggagt

SEQ ID NO: 570 - RNA, 21 nt, synthetic construct
  source 1..21: mol_type = other RNA
ccgcccataatcgagaagcga

SEQ ID NO: 571 - RNA, 21 nt, synthetic construct
  source 1..21: mol_type = other RNA
ccgccctgggcctggaagaag

SEQ ID NO: 572 - RNA, 21 nt, synthetic construct
  source 1..21: mol_type = other RNA
ccgtcttgtaaggaccgccct

SEQ ID NO: 573 - RNA, 21 nt, synthetic construct
  source 1..21: mol_type = other RNA
cctaggcaaaagaatcccgcc

SEQ ID NO: 574 - RNA, 21 nt, synthetic construct
  source 1..21: mol_type = other RNA
cctaggcttaaggggctaact

SEQ ID NO: 575 - RNA, 21 nt, synthetic construct
  source 1..21: mol_type = other RNA
cctcaaatcttacagctgctc

SEQ ID NO: 576 - RNA, 21 nt, synthetic construct
  source 1..21: mol_type = other RNA
cctccatgtcgagtcgcttct

SEQ ID NO: 577 - RNA, 21 nt, synthetic construct
  source 1..21: mol_type = other RNA
cctcccgtcttgtaaggaccg

SEQ ID NO: 578 - RNA, 21 nt, synthetic construct
  source 1..21: mol_type = other RNA
cctccctcctttcctcctcgc

SEQ ID NO: 579 - RNA, 21 nt, synthetic construct
  source 1..21: mol_type = other RNA
cctcctcgcgtgatctcgtca

SEQ ID NO: 580 - RNA, 21 nt, synthetic construct
  source 1..21: mol_type = other RNA
cctcctttcctcctcgcgtga

SEQ ID NO: 581 - RNA, 21 nt, synthetic construct
  source 1..21: mol_type = other RNA
cctcgcgtgatctcgtcatcg

SEQ ID NO: 582 - RNA, 21 nt, synthetic construct
  source 1..21: mol_type = other RNA
cctgcagggcaacgcccaggg

SEQ ID NO: 583 - RNA, 21 nt, synthetic construct
  source 1..21: mol_type = other RNA
cctgcaggggagtgagcagct

SEQ ID NO: 584 - RNA, 21 nt, synthetic construct
  source 1..21: mol_type = other RNA
cctggaagaagccctccctcc

SEQ ID NO: 585 - RNA, 21 nt, synthetic construct
  source 1..21: mol_type = other RNA
cctgggcctggaagaagccct

SEQ ID NO: 586 - RNA, 21 nt, synthetic construct
  source 1..21: mol_type = other RNA
cctgggcgttgccctgcaggg

SEQ ID NO: 587 - RNA, 21 nt, synthetic construct
  source 1..21: mol_type = other RNA
ccttaagcctaggcaaaagaa

SEQ ID NO: 588 - RNA, 21 nt, synthetic construct
  source 1..21: mol_type = other RNA
ccttacaagacgggaggcagc

SEQ ID NO: 589 - RNA, 21 nt, synthetic construct
  source 1..21: mol_type = other RNA
cctttatgggagttctctgct

SEQ ID NO: 590 - RNA, 21 nt, synthetic construct
  source 1..21: mol_type = other RNA
cctttcctcctcgcgtgatct

SEQ ID NO: 591 - RNA, 21 nt, synthetic construct
  source 1..21: mol_type = other RNA
cgacatggaggcgatgacgag

SEQ ID NO: 592 - RNA, 21 nt, synthetic construct
  source 1..21: mol_type = other RNA
cgactcgacatggaggcgatg

SEQ ID NO: 593 - RNA, 21 nt, synthetic construct
  source 1..21: mol_type = other RNA
cgagaagcgactcgacatgga

SEQ ID NO: 594 - RNA, 21 nt, synthetic construct
  source 1..21: mol_type = other RNA
cgagatcacgcgaggaggaaa

SEQ ID NO: 595 - RNA, 21 nt, synthetic construct
  source 1..21: mol_type = other RNA
cgaggaggaaaggagggaggg

SEQ ID NO: 596 - RNA, 21 nt, synthetic construct
  source 1..21: mol_type = other RNA
cgagtcgcttctcgattatgg

SEQ ID NO: 597 - RNA, 21 nt, synthetic construct
  source 1..21: mol_type = other RNA
cgatgacgagatcacgcgagg

SEQ ID NO: 598 - RNA, 21 nt, synthetic construct
  source 1..21: mol_type = other RNA
cgattatgggcgggattcttt

SEQ ID NO: 599 - RNA, 21 nt, synthetic construct
  source 1..21: mol_type = other RNA
cgcaatacctttatgggagtt

SEQ ID NO: 600 - RNA, 21 nt, synthetic construct
  source 1..21: mol_type = other RNA
cgcccagggaccaagttagcc

SEQ ID NO: 601 - RNA, 21 nt, synthetic construct
  source 1..21: mol_type = other RNA
cgcccataatcgagaagcgac

SEQ ID NO: 602 - RNA, 21 nt, synthetic construct
  source 1..21: mol_type = other RNA
cgcccctcaaatcttacagct

SEQ ID NO: 603 - RNA, 21 nt, synthetic construct
  source 1..21: mol_type = other RNA
cgccctgggcctggaagaagc

SEQ ID NO: 604 - RNA, 21 nt, synthetic construct
  source 1..21: mol_type = other RNA
cgcctccatgtcgagtcgctt

SEQ ID NO: 605 - RNA, 21 nt, synthetic construct
  source 1..21: mol_type = other RNA
cgcgaggaggaaaggagggag

SEQ ID NO: 606 - RNA, 21 nt, synthetic construct
  source 1..21: mol_type = other RNA
cgcgtgatctcgtcatcgcct

SEQ ID NO: 607 - RNA, 21 nt, synthetic construct
  source 1..21: mol_type = other RNA
cgcttctcgattatgggcggg

SEQ ID NO: 608 - RNA, 21 nt, synthetic construct
  source 1..21: mol_type = other RNA
cggagtcgcccctcaaatctt

SEQ ID NO: 609 - RNA, 21 nt, synthetic construct
  source 1..21: mol_type = other RNA
cgggaggcagcagagaactcc

SEQ ID NO: 610 - RNA, 21 nt, synthetic construct
  source 1..21: mol_type = other RNA
cgggattcttttgcctaggct

SEQ ID NO: 611 - RNA, 21 nt, synthetic construct
  source 1..21: mol_type = other RNA
cggtccttacaagacgggagg

SEQ ID NO: 612 - RNA, 21 nt, synthetic construct
  source 1..21: mol_type = other RNA
cgtcatcgcctccatgtcgag

SEQ ID NO: 613 - RNA, 21 nt, synthetic construct
  source 1..21: mol_type = other RNA
cgtcttgtaaggaccgccctg

SEQ ID NO: 614 - RNA, 21 nt, synthetic construct
  source 1..21: mol_type = other RNA
cgtgatctcgtcatcgcctcc

SEQ ID NO: 615 - RNA, 21 nt, synthetic construct
  source 1..21: mol_type = other RNA
cgttgccctgcaggggagtga

SEQ ID NO: 616 - RNA, 21 nt, synthetic construct
  source 1..21: mol_type = other RNA
ctaacttggtccctgggcgtt

SEQ ID NO: 617 - RNA, 21 nt, synthetic construct
  source 1..21: mol_type = other RNA
ctaggcaaaagaatcccgccc

SEQ ID NO: 618 - RNA, 21 nt, synthetic construct
  source 1..21: mol_type = other RNA
ctaggcttaaggggctaactt

SEQ ID NO: 619 - RNA, 21 nt, synthetic construct
  source 1..21: mol_type = other RNA
ctcaaatcttacagctgctca

SEQ ID NO: 620 - RNA, 21 nt, synthetic construct
  source 1..21: mol_type = other RNA
ctcactcccctgcagggcaac

SEQ ID NO: 621 - RNA, 21 nt, synthetic construct
  source 1..21: mol_type = other RNA
ctccatgtcgagtcgcttctc

SEQ ID NO: 622 - RNA, 21 nt, synthetic construct
  source 1..21: mol_type = other RNA
ctcccataaaggtattgcggc

SEQ ID NO: 623 - RNA, 21 nt, synthetic construct
  source 1..21: mol_type = other RNA
ctcccctgcagggcaacgccc

SEQ ID NO: 624 - RNA, 21 nt, synthetic construct
  source 1..21: mol_type = other RNA
ctcccgtcttgtaaggaccgc

SEQ ID NO: 625 - RNA, 21 nt, synthetic construct
  source 1..21: mol_type = other RNA
ctccctcctttcctcctcgcg

SEQ ID NO: 626 - RNA, 21 nt, synthetic construct
  source 1..21: mol_type = other RNA
ctcctcgcgtgatctcgtcat

SEQ ID NO: 627 - RNA, 21 nt, synthetic construct
  source 1..21: mol_type = other RNA
ctcctttcctcctcgcgtgat

SEQ ID NO: 628 - RNA, 21 nt, synthetic construct
  source 1..21: mol_type = other RNA
ctcgacatggaggcgatgacg

SEQ ID NO: 629 - RNA, 21 nt, synthetic construct
  source 1..21: mol_type = other RNA
ctcgattatgggcgggattct

SEQ ID NO: 630 - RNA, 21 nt, synthetic construct
  source 1..21: mol_type = other RNA
ctcgcgtgatctcgtcatcgc

SEQ ID NO: 631 - RNA, 21 nt, synthetic construct
  source 1..21: mol_type = other RNA
ctcgtcatcgcctccatgtcg

SEQ ID NO: 632 - RNA, 21 nt, synthetic construct
  source 1..21: mol_type = other RNA
ctctgctgcctcccgtcttgt

SEQ ID NO: 633 - RNA, 21 nt, synthetic construct
  source 1..21: mol_type = other RNA
ctgcagggcaacgcccaggga

SEQ ID NO: 634 - RNA, 21 nt, synthetic construct
  source 1..21: mol_type = other RNA
ctgcaggggagtgagcagctg

SEQ ID NO: 635 - RNA, 21 nt, synthetic construct
  source 1..21: mol_type = other RNA
ctgcctcccgtcttgtaagga

SEQ ID NO: 636 - RNA, 21 nt, synthetic construct
  source 1..21: mol_type = other RNA
ctgctcactcccctgcagggc

SEQ ID NO: 637 - RNA, 21 nt, synthetic construct
  source 1..21: mol_type = other RNA
ctgctgcctcccgtcttgtaa

SEQ ID NO: 638 - RNA, 21 nt, synthetic construct
  source 1..21: mol_type = other RNA
ctggaagaagccctccctcct

SEQ ID NO: 639 - RNA, 21 nt, synthetic construct
  source 1..21: mol_type = other RNA
ctgggcctggaagaagccctc

SEQ ID NO: 640 - RNA, 21 nt, synthetic construct
  source 1..21: mol_type = other RNA
ctgggcgttgccctgcagggg

SEQ ID NO: 641 - RNA, 21 nt, synthetic construct
  source 1..21: mol_type = other RNA
cttaagcctaggcaaaagaat

SEQ ID NO: 642 - RNA, 21 nt, synthetic construct
  source 1..21: mol_type = other RNA
cttaaggggctaacttggtcc

SEQ ID NO: 643 - RNA, 21 nt, synthetic construct
  source 1..21: mol_type = other RNA
cttacaagacgggaggcagca

SEQ ID NO: 644 - RNA, 21 nt, synthetic construct
  source 1..21: mol_type = other RNA
cttacagctgctcactcccct

SEQ ID NO: 645 - RNA, 21 nt, synthetic construct
  source 1..21: mol_type = other RNA
cttccaggcccagggcggtcc

SEQ ID NO: 646 - RNA, 21 nt, synthetic construct
  source 1..21: mol_type = other RNA
cttctcgattatgggcgggat

SEQ ID NO: 647 - RNA, 21 nt, synthetic construct
  source 1..21: mol_type = other RNA
cttcttccaggcccagggcgg

SEQ ID NO: 648 - RNA, 21 nt, synthetic construct
  source 1..21: mol_type = other RNA
cttggtccctgggcgttgccc

SEQ ID NO: 649 - RNA, 21 nt, synthetic construct
  source 1..21: mol_type = other RNA
cttgtaaggaccgccctgggc

SEQ ID NO: 650 - RNA, 21 nt, synthetic construct
  source 1..21: mol_type = other RNA
ctttatgggagttctctgctg

SEQ ID NO: 651 - RNA, 21 nt, synthetic construct
  source 1..21: mol_type = other RNA
ctttcctcctcgcgtgatctc

SEQ ID NO: 652 - RNA, 21 nt, synthetic construct
  source 1..21: mol_type = other RNA
cttttgcctaggcttaagggg

SEQ ID NO: 653 - RNA, 21 nt, synthetic construct
  source 1..21: mol_type = other RNA
gaaaggagggagggcttcttc

SEQ ID NO: 654 - RNA, 21 nt, synthetic construct
  source 1..21: mol_type = other RNA
gaactcccataaaggtattgc

SEQ ID NO: 655 - RNA, 21 nt, synthetic construct
  source 1..21: mol_type = other RNA
gaagaagccctccctcctttc

SEQ ID NO: 656 - RNA, 21 nt, synthetic construct
  source 1..21: mol_type = other RNA
gaagccctccctcctttcctc

SEQ ID NO: 657 - RNA, 21 nt, synthetic construct
  source 1..21: mol_type = other RNA
gaagcgactcgacatggaggc

SEQ ID NO: 658 - RNA, 21 nt, synthetic construct
  source 1..21: mol_type = other RNA
gaatcccgcccataatcgaga

SEQ ID NO: 659 - RNA, 21 nt, synthetic construct
  source 1..21: mol_type = other RNA
gacatggaggcgatgacgaga

SEQ ID NO: 660 - RNA, 21 nt, synthetic construct
  source 1..21: mol_type = other RNA
gaccaagttagccccttaagc

SEQ ID NO: 661 - RNA, 21 nt, synthetic construct
  source 1..21: mol_type = other RNA
gaccgccctgggcctggaaga

SEQ ID NO: 662 - RNA, 21 nt, synthetic construct
  source 1..21: mol_type = other RNA
gacgagatcacgcgaggagga

SEQ ID NO: 663 - RNA, 21 nt, synthetic construct
  source 1..21: mol_type = other RNA
gacgggaggcagcagagaact

SEQ ID NO: 664 - RNA, 21 nt, synthetic construct
  source 1..21: mol_type = other RNA
gactcgacatggaggcgatga

SEQ ID NO: 665 - RNA, 21 nt, synthetic construct
  source 1..21: mol_type = other RNA
gagaactcccataaaggtatt

SEQ ID NO: 666 - RNA, 21 nt, synthetic construct
  source 1..21: mol_type = other RNA
gagaagcgactcgacatggag

SEQ ID NO: 667 - RNA, 21 nt, synthetic construct
  source 1..21: mol_type = other RNA
gagatcacgcgaggaggaaag

SEQ ID NO: 668 - RNA, 21 nt, synthetic construct
  source 1..21: mol_type = other RNA
gagcagctgtaagatttgagg

SEQ ID NO: 669 - RNA, 21 nt, synthetic construct
  source 1..21: mol_type = other RNA
gaggaaaggagggagggcttc

SEQ ID NO: 670 - RNA, 21 nt, synthetic construct
  source 1..21: mol_type = other RNA
gaggaggaaaggagggagggc

SEQ ID NO: 671 - RNA, 21 nt, synthetic construct
  source 1..21: mol_type = other RNA
gaggcagcagagaactcccat

SEQ ID NO: 672 - RNA, 21 nt, synthetic construct
  source 1..21: mol_type = other RNA
gaggcgatgacgagatcacgc

SEQ ID NO: 673 - RNA, 21 nt, synthetic construct
  source 1..21: mol_type = other RNA
gagggagggcttcttccaggc

SEQ ID NO: 674 - RNA, 21 nt, synthetic construct
  source 1..21: mol_type = other RNA
gagggcttcttccaggcccag

SEQ ID NO: 675 - RNA, 21 nt, synthetic construct
  source 1..21: mol_type = other RNA
gaggggagtgccgcaatacct

SEQ ID NO: 676 - RNA, 21 nt, synthetic construct
  source 1..21: mol_type = other RNA
gagtcgcccctcaaatcttac

SEQ ID NO: 677 - RNA, 21 nt, synthetic construct
  source 1..21: mol_type = other RNA
gagtcgcttctcgattatggg

SEQ ID NO: 678 - RNA, 21 nt, synthetic construct
  source 1..21: mol_type = other RNA
gagtgagcagctgtaagattt

SEQ ID NO: 679 - RNA, 21 nt, synthetic construct
  source 1..21: mol_type = other RNA
gagtgccgcaatacctttatg

SEQ ID NO: 680 - RNA, 21 nt, synthetic construct
  source 1..21: mol_type = other RNA
gagttctctgctgcctcccgt

SEQ ID NO: 681 - RNA, 21 nt, synthetic construct
  source 1..21: mol_type = other RNA
gatcacgcgaggaggaaagga

SEQ ID NO: 682 - RNA, 21 nt, synthetic construct
  source 1..21: mol_type = other RNA
gatctcgtcatcgcctccatg

SEQ ID NO: 683 - RNA, 21 nt, synthetic construct
  source 1..21: mol_type = other RNA
gatgacgagatcacgcgagga

SEQ ID NO: 684 - RNA, 21 nt, synthetic construct
  source 1..21: mol_type = other RNA
gattatgggcgggattctttt

SEQ ID NO: 685 - RNA, 21 nt, synthetic construct
  source 1..21: mol_type = other RNA
gattcttttgcctaggcttaa

SEQ ID NO: 686 - RNA, 21 nt, synthetic construct
  source 1..21: mol_type = other RNA
gcaaaagaatcccgcccataa

SEQ ID NO: 687 - RNA, 21 nt, synthetic construct
  source 1..21: mol_type = other RNA
gcaacgcccagggaccaagtt

SEQ ID NO: 688 - RNA, 21 nt, synthetic construct
  source 1..21: mol_type = other RNA
gcaatacctttatgggagttc

SEQ ID NO: 689 - RNA, 21 nt, synthetic construct
  source 1..21: mol_type = other RNA
gcagagaactcccataaaggt

SEQ ID NO: 690 - RNA, 21 nt, synthetic construct
  source 1..21: mol_type = other RNA
gcagcagagaactcccataaa

SEQ ID NO: 691 - RNA, 21 nt, synthetic construct
  source 1..21: mol_type = other RNA
gcagctgtaagatttgagggg

SEQ ID NO: 692 - RNA, 21 nt, synthetic construct
  source 1..21: mol_type = other RNA
gcagggcaacgcccagggacc

SEQ ID NO: 693 - RNA, 21 nt, synthetic construct
  source 1..21: mol_type = other RNA
gcaggggagtgagcagctgta

SEQ ID NO: 694 - RNA, 21 nt, synthetic construct
  source 1..21: mol_type = other RNA
gcccagggaccaagttagccc

SEQ ID NO: 695 - RNA, 21 nt, synthetic construct
  source 1..21: mol_type = other RNA
gcccagggcggtccttacaag

SEQ ID NO: 696 - RNA, 21 nt, synthetic construct
  source 1..21: mol_type = other RNA
gcccataatcgagaagcgact

SEQ ID NO: 697 - RNA, 21 nt, synthetic construct
  source 1..21: mol_type = other RNA
gcccctcaaatcttacagctg

SEQ ID NO: 698 - RNA, 21 nt, synthetic construct
  source 1..21: mol_type = other RNA
gccccttaagcctaggcaaaa

SEQ ID NO: 699 - RNA, 21 nt, synthetic construct
  source 1..21: mol_type = other RNA
gccctccctcctttcctcctc

SEQ ID NO: 700 - RNA, 21 nt, synthetic construct
  source 1..21: mol_type = other RNA
gccctgcaggggagtgagcag

SEQ ID NO: 701 - RNA, 21 nt, synthetic construct
  source 1..21: mol_type = other RNA
gccctgggcctggaagaagcc

SEQ ID NO: 702 - RNA, 21 nt, synthetic construct
  source 1..21: mol_type = other RNA
gccgcaatacctttatgggag

SEQ ID NO: 703 - RNA, 21 nt, synthetic construct
  source 1..21: mol_type = other RNA
gcctaggcaaaagaatcccgc

SEQ ID NO: 704 - RNA, 21 nt, synthetic construct
  source 1..21: mol_type = other RNA
gcctaggcttaaggggctaac

SEQ ID NO: 705 - RNA, 21 nt, synthetic construct
  source 1..21: mol_type = other RNA
gcctccatgtcgagtcgcttc

SEQ ID NO: 706 - RNA, 21 nt, synthetic construct
  source 1..21: mol_type = other RNA
gcctcccgtcttgtaaggacc

SEQ ID NO: 707 - RNA, 21 nt, synthetic construct
  source 1..21: mol_type = other RNA
gcctggaagaagccctccctc

SEQ ID NO: 708 - RNA, 21 nt, synthetic construct
  source 1..21: mol_type = other RNA
gcgactcgacatggaggcgat

SEQ ID NO: 709 - RNA, 21 nt, synthetic construct
  source 1..21: mol_type = other RNA
gcgaggaggaaaggagggagg

SEQ ID NO: 710 - RNA, 21 nt, synthetic construct
  source 1..21: mol_type = other RNA
gcgatgacgagatcacgcgag

SEQ ID NO: 711 - RNA, 21 nt, synthetic construct
  source 1..21: mol_type = other RNA
gcgggattcttttgcctaggc

SEQ ID NO: 712 - RNA, 21 nt, synthetic construct
  source 1..21: mol_type = other RNA
gcggtccttacaagacgggag

SEQ ID NO: 713 - RNA, 21 nt, synthetic construct
  source 1..21: mol_type = other RNA
gcgtgatctcgtcatcgcctc

SEQ ID NO: 714 - RNA, 21 nt, synthetic construct
  source 1..21: mol_type = other RNA
gcgttgccctgcaggggagtg

SEQ ID NO: 715 - RNA, 21 nt, synthetic construct
  source 1..21: mol_type = other RNA
gctaacttggtccctgggcgt

SEQ ID NO: 716 - RNA, 21 nt, synthetic construct
  source 1..21: mol_type = other RNA
gctcactcccctgcagggcaa

SEQ ID NO: 717 - RNA, 21 nt, synthetic construct
  source 1..21: mol_type = other RNA
gctgcctcccgtcttgtaagg

SEQ ID NO: 718 - RNA, 21 nt, synthetic construct
  source 1..21: mol_type = other RNA
gctgctcactcccctgcaggg

SEQ ID NO: 719 - RNA, 21 nt, synthetic construct
  source 1..21: mol_type = other RNA
gcttaaggggctaacttggtc

SEQ ID NO: 720 - RNA, 21 nt, synthetic construct
  source 1..21: mol_type = other RNA
gcttctcgattatgggcggga

SEQ ID NO: 721 - RNA, 21 nt, synthetic construct
  source 1..21: mol_type = other RNA
gcttcttccaggcccagggcg

SEQ ID NO: 722 - RNA, 21 nt, synthetic construct
  source 1..21: mol_type = other RNA
ggaaaggagggagggcttctt

SEQ ID NO: 723 - RNA, 21 nt, synthetic construct
  source 1..21: mol_type = other RNA
ggaagaagccctccctccttt

SEQ ID NO: 724 - RNA, 21 nt, synthetic construct
  source 1..21: mol_type = other RNA
ggaccaagttagccccttaag

SEQ ID NO: 725 - RNA, 21 nt, synthetic construct
  source 1..21: mol_type = other RNA
ggaccgccctgggcctggaag

SEQ ID NO: 726 - RNA, 21 nt, synthetic construct
  source 1..21: mol_type = other RNA
ggaggaaaggagggagggctt

SEQ ID NO: 727 - RNA, 21 nt, synthetic construct
  source 1..21: mol_type = other RNA
ggaggcagcagagaactccca

SEQ ID NO: 728 - RNA, 21 nt, synthetic construct
  source 1..21: mol_type = other RNA
ggaggcgatgacgagatcacg

SEQ ID NO: 729 - RNA, 21 nt, synthetic construct
  source 1..21: mol_type = other RNA
ggagggagggcttcttccagg

SEQ ID NO: 730 - RNA, 21 nt, synthetic construct
  source 1..21: mol_type = other RNA
ggagggcttcttccaggccca

SEQ ID NO: 731 - RNA, 21 nt, synthetic construct
  source 1..21: mol_type = other RNA
ggaggggagtgccgcaatacc

SEQ ID NO: 732 - RNA, 21 nt, synthetic construct
  source 1..21: mol_type = other RNA
ggagtcgcccctcaaatctta

SEQ ID NO: 733 - RNA, 21 nt, synthetic construct
  source 1..21: mol_type = other RNA
ggagtgagcagctgtaagatt

SEQ ID NO: 734 - RNA, 21 nt, synthetic construct
  source 1..21: mol_type = other RNA
ggagtgccgcaatacctttat

SEQ ID NO: 735 - RNA, 21 nt, synthetic construct
  source 1..21: mol_type = other RNA
ggagttctctgctgcctcccg

SEQ ID NO: 736 - RNA, 21 nt, synthetic construct
  source 1..21: mol_type = other RNA
ggattcttttgcctaggctta

SEQ ID NO: 737 - RNA, 21 nt, synthetic construct
  source 1..21: mol_type = other RNA
ggcaaaagaatcccgcccata

SEQ ID NO: 738 - RNA, 21 nt, synthetic construct
  source 1..21: mol_type = other RNA
ggcaacgcccagggaccaagt

SEQ ID NO: 739 - RNA, 21 nt, synthetic construct
  source 1..21: mol_type = other RNA
ggcagcagagaactcccataa

SEQ ID NO: 740 - RNA, 21 nt, synthetic construct
  source 1..21: mol_type = other RNA
ggcccagggcggtccttacaa

SEQ ID NO: 741 - RNA, 21 nt, synthetic construct
  source 1..21: mol_type = other RNA
ggcctggaagaagccctccct

SEQ ID NO: 742 - RNA, 21 nt, synthetic construct
  source 1..21: mol_type = other RNA
ggcgatgacgagatcacgcga

SEQ ID NO: 743 - RNA, 21 nt, synthetic construct
  source 1..21: mol_type = other RNA
ggcgggattcttttgcctagg

SEQ ID NO: 744 - RNA, 21 nt, synthetic construct
  source 1..21: mol_type = other RNA
ggcggtccttacaagacggga

SEQ ID NO: 745 - RNA, 21 nt, synthetic construct
  source 1..21: mol_type = other RNA
ggcgttgccctgcaggggagt

SEQ ID NO: 746 - RNA, 21 nt, synthetic construct
  source 1..21: mol_type = other RNA
ggctaacttggtccctgggcg

SEQ ID NO: 747 - RNA, 21 nt, synthetic construct
  source 1..21: mol_type = other RNA
ggcttaaggggctaacttggt

SEQ ID NO: 748 - RNA, 21 nt, synthetic construct
  source 1..21: mol_type = other RNA
ggcttcttccaggcccagggc

SEQ ID NO: 749 - RNA, 21 nt, synthetic construct
  source 1..21: mol_type = other RNA
gggaccaagttagccccttaa

SEQ ID NO: 750 - RNA, 21 nt, synthetic construct
  source 1..21: mol_type = other RNA
gggaggcagcagagaactccc

SEQ ID NO: 751 - RNA, 21 nt, synthetic construct
  source 1..21: mol_type = other RNA
gggagggcttcttccaggccc

SEQ ID NO: 752 - RNA, 21 nt, synthetic construct
  source 1..21: mol_type = other RNA
gggaggggagtgccgcaatac

SEQ ID NO: 753 - RNA, 21 nt, synthetic construct
  source 1..21: mol_type = other RNA
gggagtgagcagctgtaagat

SEQ ID NO: 754 - RNA, 21 nt, synthetic construct
  source 1..21: mol_type = other RNA
gggagtgccgcaataccttta

SEQ ID NO: 755 - RNA, 21 nt, synthetic construct
  source 1..21: mol_type = other RNA
gggagttctctgctgcctccc

SEQ ID NO: 756 - RNA, 21 nt, synthetic construct
  source 1..21: mol_type = other RNA
gggattcttttgcctaggctt

SEQ ID NO: 757 - RNA, 21 nt, synthetic construct
  source 1..21: mol_type = other RNA
gggcaacgcccagggaccaag

SEQ ID NO: 758 - RNA, 21 nt, synthetic construct
  source 1..21: mol_type = other RNA
gggcctggaagaagccctccc

SEQ ID NO: 759 - RNA, 21 nt, synthetic construct
  source 1..21: mol_type = other RNA
gggcgggattcttttgcctag

SEQ ID NO: 760 - RNA, 21 nt, synthetic construct
  source 1..21: mol_type = other RNA
gggcggtccttacaagacggg

SEQ ID NO: 761 - RNA, 21 nt, synthetic construct
  source 1..21: mol_type = other RNA
gggcgttgccctgcaggggag

SEQ ID NO: 762 - RNA, 21 nt, synthetic construct
  source 1..21: mol_type = other RNA
gggctaacttggtccctgggc

SEQ ID NO: 763 - RNA, 21 nt, synthetic construct
  source 1..21: mol_type = other RNA
gggcttcttccaggcccaggg

SEQ ID NO: 764 - RNA, 21 nt, synthetic construct
  source 1..21: mol_type = other RNA
ggggaggggagtgccgcaata

SEQ ID NO: 765 - RNA, 21 nt, synthetic construct
  source 1..21: mol_type = other RNA
ggggagtgagcagctgtaaga

SEQ ID NO: 766 - RNA, 21 nt, synthetic construct
  source 1..21: mol_type = other RNA
ggggagtgccgcaataccttt

SEQ ID NO: 767 - RNA, 21 nt, synthetic construct
  source 1..21: mol_type = other RNA
ggggctaacttggtccctggg

SEQ ID NO: 768 - RNA, 21 nt, synthetic construct
  source 1..21: mol_type = other RNA
ggtccctgggcgttgccctgc

SEQ ID NO: 769 - RNA, 21 nt, synthetic construct
  source 1..21: mol_type = other RNA
ggtccttacaagacgggaggc

SEQ ID NO: 770 - RNA, 21 nt, synthetic construct
  source 1..21: mol_type = other RNA
gtaaggaccgccctgggcctg

SEQ ID NO: 771 - RNA, 21 nt, synthetic construct
  source 1..21: mol_type = other RNA
gtcatcgcctccatgtcgagt

SEQ ID NO: 772 - RNA, 21 nt, synthetic construct
  source 1..21: mol_type = other RNA
gtccctgggcgttgccctgca

SEQ ID NO: 773 - RNA, 21 nt, synthetic construct
  source 1..21: mol_type = other RNA
gtccttacaagacgggaggca

SEQ ID NO: 774 - RNA, 21 nt, synthetic construct
  source 1..21: mol_type = other RNA
gtcgagtcgcttctcgattat

SEQ ID NO: 775 - RNA, 21 nt, synthetic construct
  source 1..21: mol_type = other RNA
gtcgcccctcaaatcttacag

SEQ ID NO: 776 - RNA, 21 nt, synthetic construct
  source 1..21: mol_type = other RNA
gtcgcttctcgattatgggcg

SEQ ID NO: 777 - RNA, 21 nt, synthetic construct
  source 1..21: mol_type = other RNA
gtcttgtaaggaccgccctgg

SEQ ID NO: 778 - RNA, 21 nt, synthetic construct
  source 1..21: mol_type = other RNA
gtgagcagctgtaagatttga

SEQ ID NO: 779 - RNA, 21 nt, synthetic construct
  source 1..21: mol_type = other RNA
gtgatctcgtcatcgcctcca

SEQ ID NO: 780 - RNA, 21 nt, synthetic construct
  source 1..21: mol_type = other RNA
gtgccgcaatacctttatggg

SEQ ID NO: 781 - RNA, 21 nt, synthetic construct
  source 1..21: mol_type = other RNA
gttagccccttaagcctaggc

SEQ ID NO: 782 - RNA, 21 nt, synthetic construct
  source 1..21: mol_type = other RNA
gttctctgctgcctcccgtct

SEQ ID NO: 783 - RNA, 21 nt, synthetic construct
  source 1..21: mol_type = other RNA
gttgccctgcaggggagtgag

SEQ ID NO: 784 - RNA, 21 nt, synthetic construct
  source 1..21: mol_type = other RNA
taacttggtccctgggcgttg

SEQ ID NO: 785 - RNA, 21 nt, synthetic construct
  source 1..21: mol_type = other RNA
taagcctaggcaaaagaatcc

SEQ ID NO: 786 - RNA, 21 nt, synthetic construct
  source 1..21: mol_type = other RNA
taaggaccgccctgggcctgg

SEQ ID NO: 787 - RNA, 21 nt, synthetic construct
  source 1..21: mol_type = other RNA
taaggggctaacttggtccct

SEQ ID NO: 788 - RNA, 21 nt, synthetic construct
  source 1..21: mol_type = other RNA
taatcgagaagcgactcgaca

SEQ ID NO: 789 - RNA, 21 nt, synthetic construct
  source 1..21: mol_type = other RNA
tacaagacgggaggcagcaga

SEQ ID NO: 790 - RNA, 21 nt, synthetic construct
  source 1..21: mol_type = other RNA
tacagctgctcactcccctgc

SEQ ID NO: 791 - RNA, 21 nt, synthetic construct
  source 1..21: mol_type = other RNA
tacctttatgggagttctctg

SEQ ID NO: 792 - RNA, 21 nt, synthetic construct
  source 1..21: mol_type = other RNA
tagccccttaagcctaggcaa

SEQ ID NO: 793 - RNA, 21 nt, synthetic construct
  source 1..21: mol_type = other RNA
taggcaaaagaatcccgccca

SEQ ID NO: 794 - RNA, 21 nt, synthetic construct
  source 1..21: mol_type = other RNA
taggcttaaggggctaacttg

SEQ ID NO: 795 - RNA, 21 nt, synthetic construct
  source 1..21: mol_type = other RNA
tatgggagttctctgctgcct

SEQ ID NO: 796 - RNA, 21 nt, synthetic construct
  source 1..21: mol_type = other RNA
tatgggcgggattcttttgcc

SEQ ID NO: 797 - RNA, 21 nt, synthetic construct
  source 1..21: mol_type = other RNA
tcaaatcttacagctgctcac

SEQ ID NO: 798 - RNA, 21 nt, synthetic construct
  source 1..21: mol_type = other RNA
tcacgcgaggaggaaaggagg

SEQ ID NO: 799 - RNA, 21 nt, synthetic construct
  source 1..21: mol_type = other RNA
tcactcccctgcagggcaacg

SEQ ID NO: 800 - RNA, 21 nt, synthetic construct
  source 1..21: mol_type = other RNA
tcatcgcctccatgtcgagtc

SEQ ID NO: 801 - RNA, 21 nt, synthetic construct
  source 1..21: mol_type = other RNA
tccaggcccagggcggtcctt

SEQ ID NO: 802 - RNA, 21 nt, synthetic construct
  source 1..21: mol_type = other RNA
tccatgtcgagtcgcttctcg

SEQ ID NO: 803 - RNA, 21 nt, synthetic construct
  source 1..21: mol_type = other RNA
tcccataaaggtattgcggca

SEQ ID NO: 804 - RNA, 21 nt, synthetic construct
  source 1..21: mol_type = other RNA
tcccctgcagggcaacgccca

SEQ ID NO: 805 - RNA, 21 nt, synthetic construct
  source 1..21: mol_type = other RNA
tcccgcccataatcgagaagc

SEQ ID NO: 806 - RNA, 21 nt, synthetic construct
  source 1..21: mol_type = other RNA
tcccgtcttgtaaggaccgcc

SEQ ID NO: 807 - RNA, 21 nt, synthetic construct
  source 1..21: mol_type = other RNA
tccctcctttcctcctcgcgt

SEQ ID NO: 808 - RNA, 21 nt, synthetic construct
  source 1..21: mol_type = other RNA
tccctgggcgttgccctgcag

SEQ ID NO: 809 - RNA, 21 nt, synthetic construct
  source 1..21: mol_type = other RNA
tcctcctcgcgtgatctcgtc

SEQ ID NO: 810 - RNA, 21 nt, synthetic construct
  source 1..21: mol_type = other RNA
tcctcgcgtgatctcgtcatc

SEQ ID NO: 811 - RNA, 21 nt, synthetic construct
  source 1..21: mol_type = other RNA
tccttacaagacgggaggcag

SEQ ID NO: 812 - RNA, 21 nt, synthetic construct
  source 1..21: mol_type = other RNA
tcctttcctcctcgcgtgatc

SEQ ID NO: 813 - RNA, 21 nt, synthetic construct
  source 1..21: mol_type = other RNA
tcgacatggaggcgatgacga

SEQ ID NO: 814 - RNA, 21 nt, synthetic construct
  source 1..21: mol_type = other RNA
tcgagaagcgactcgacatgg

SEQ ID NO: 815 - RNA, 21 nt, synthetic construct
  source 1..21: mol_type = other RNA
tcgagtcgcttctcgattatg

SEQ ID NO: 816 - RNA, 21 nt, synthetic construct
  source 1..21: mol_type = other RNA
tcgattatgggcgggattctt

SEQ ID NO: 817 - RNA, 21 nt, synthetic construct
  source 1..21: mol_type = other RNA
tcgcccctcaaatcttacagc

SEQ ID NO: 818 - RNA, 21 nt, synthetic construct
  source 1..21: mol_type = other RNA
tcgcctccatgtcgagtcgct

SEQ ID NO: 819 - RNA, 21 nt, synthetic construct
  source 1..21: mol_type = other RNA
tcgcgtgatctcgtcatcgcc

SEQ ID NO: 820 - RNA, 21 nt, synthetic construct
  source 1..21: mol_type = other RNA
tcgcttctcgattatgggcgg

SEQ ID NO: 821 - RNA, 21 nt, synthetic construct
  source 1..21: mol_type = other RNA
tcgtcatcgcctccatgtcga

SEQ ID NO: 822 - RNA, 21 nt, synthetic construct
  source 1..21: mol_type = other RNA
tctcgattatgggcgggattc

SEQ ID NO: 823 - RNA, 21 nt, synthetic construct
  source 1..21: mol_type = other RNA
tctcgtcatcgcctccatgtc

SEQ ID NO: 824 - RNA, 21 nt, synthetic construct
  source 1..21: mol_type = other RNA
tctctgctgcctcccgtcttg

SEQ ID NO: 825 - RNA, 21 nt, synthetic construct
  source 1..21: mol_type = other RNA
tctgctgcctcccgtcttgta

SEQ ID NO: 826 - RNA, 21 nt, synthetic construct
  source 1..21: mol_type = other RNA
tcttacagctgctcactcccc

SEQ ID NO: 827 - RNA, 21 nt, synthetic construct
  source 1..21: mol_type = other RNA
tcttccaggcccagggcggtc

SEQ ID NO: 828 - RNA, 21 nt, synthetic construct
  source 1..21: mol_type = other RNA
tcttgtaaggaccgccctggg

SEQ ID NO: 829 - RNA, 21 nt, synthetic construct
  source 1..21: mol_type = other RNA
tcttttgcctaggcttaaggg

SEQ ID NO: 830 - RNA, 21 nt, synthetic construct
  source 1..21: mol_type = other RNA
tgacgagatcacgcgaggagg

SEQ ID NO: 831 - RNA, 21 nt, synthetic construct
  source 1..21: mol_type = other RNA
tgagcagctgtaagatttgag

SEQ ID NO: 832 - RNA, 21 nt, synthetic construct
  source 1..21: mol_type = other RNA
tgatctcgtcatcgcctccat

SEQ ID NO: 833 - RNA, 21 nt, synthetic construct
  source 1..21: mol_type = other RNA
tgcagggcaacgcccagggac

SEQ ID NO: 834 - RNA, 21 nt, synthetic construct
  source 1..21: mol_type = other RNA
tgcaggggagtgagcagctgt

SEQ ID NO: 835 - RNA, 21 nt, synthetic construct
  source 1..21: mol_type = other RNA
tgccctgcaggggagtgagca

SEQ ID NO: 836 - RNA, 21 nt, synthetic construct
  source 1..21: mol_type = other RNA
tgccgcaatacctttatggga

SEQ ID NO: 837 - RNA, 21 nt, synthetic construct
  source 1..21: mol_type = other RNA
tgcctaggcttaaggggctaa

SEQ ID NO: 838 - RNA, 21 nt, synthetic construct
  source 1..21: mol_type = other RNA
tgcctcccgtcttgtaaggac

SEQ ID NO: 839 - RNA, 21 nt, synthetic construct
  source 1..21: mol_type = other RNA
tgctcactcccctgcagggca

SEQ ID NO: 840 - RNA, 21 nt, synthetic construct
  source 1..21: mol_type = other RNA
tgctgcctcccgtcttgtaag

SEQ ID NO: 841 - RNA, 21 nt, synthetic construct
  source 1..21: mol_type = other RNA
tggaagaagccctccctcctt

SEQ ID NO: 842 - RNA, 21 nt, synthetic construct
  source 1..21: mol_type = other RNA
tggaggcgatgacgagatcac

SEQ ID NO: 843 - RNA, 21 nt, synthetic construct
  source 1..21: mol_type = other RNA
tgggagttctctgctgcctcc

SEQ ID NO: 844 - RNA, 21 nt, synthetic construct
  source 1..21: mol_type = other RNA
tgggcctggaagaagccctcc

SEQ ID NO: 845 - RNA, 21 nt, synthetic construct
  source 1..21: mol_type = other RNA
tgggcgggattcttttgccta

SEQ ID NO: 846 - RNA, 21 nt, synthetic construct
  source 1..21: mol_type = other RNA
tgggcgttgccctgcagggga

SEQ ID NO: 847 - RNA, 21 nt, synthetic construct
  source 1..21: mol_type = other RNA
tggtccctgggcgttgccctg

SEQ ID NO: 848 - RNA, 21 nt, synthetic construct
  source 1..21: mol_type = other RNA
tgtaaggaccgccctgggcct

SEQ ID NO: 849 - RNA, 21 nt, synthetic construct
  source 1..21: mol_type = other RNA
tgtcgagtcgcttctcgatta

SEQ ID NO: 850 - RNA, 21 nt, synthetic construct
  source 1..21: mol_type = other RNA
ttaagcctaggcaaaagaatc

SEQ ID NO: 851 - RNA, 21 nt, synthetic construct
  source 1..21: mol_type = other RNA
ttaaggggctaacttggtccc

SEQ ID NO: 852 - RNA, 21 nt, synthetic construct
  source 1..21: mol_type = other RNA
ttacaagacgggaggcagcag

SEQ ID NO: 853 - RNA, 21 nt, synthetic construct
  source 1..21: mol_type = other RNA
ttacagctgctcactcccctg

SEQ ID NO: 854 - RNA, 21 nt, synthetic construct
  source 1..21: mol_type = other RNA
ttagccccttaagcctaggca

SEQ ID NO: 855 - RNA, 21 nt, synthetic construct
  source 1..21: mol_type = other RNA
ttatgggagttctctgctgcc

SEQ ID NO: 856 - RNA, 21 nt, synthetic construct
  source 1..21: mol_type = other RNA
ttatgggcgggattcttttgc

SEQ ID NO: 857 - RNA, 21 nt, synthetic construct
  source 1..21: mol_type = other RNA
ttccaggcccagggcggtcct

SEQ ID NO: 858 - RNA, 21 nt, synthetic construct
  source 1..21: mol_type = other RNA
ttcctcctcgcgtgatctcgt

SEQ ID NO: 859 - RNA, 21 nt, synthetic construct
  source 1..21: mol_type = other RNA
ttctcgattatgggcgggatt

SEQ ID NO: 860 - RNA, 21 nt, synthetic construct
  source 1..21: mol_type = other RNA
ttctctgctgcctcccgtctt

SEQ ID NO: 861 - RNA, 21 nt, synthetic construct
  source 1..21: mol_type = other RNA
ttcttccaggcccagggcggt

SEQ ID NO: 862 - RNA, 21 nt, synthetic construct
  source 1..21: mol_type = other RNA
ttcttttgcctaggcttaagg

SEQ ID NO: 863 - RNA, 21 nt, synthetic construct
  source 1..21: mol_type = other RNA
ttgccctgcaggggagtgagc

SEQ ID NO: 864 - RNA, 21 nt, synthetic construct
  source 1..21: mol_type = other RNA
ttgcctaggcttaaggggcta

SEQ ID NO: 865 - RNA, 21 nt, synthetic construct
  source 1..21: mol_type = other RNA
ttggtccctgggcgttgccct

SEQ ID NO: 866 - RNA, 21 nt, synthetic construct
  source 1..21: mol_type = other RNA
ttgtaaggaccgccctgggcc

SEQ ID NO: 867 - RNA, 21 nt, synthetic construct
  source 1..21: mol_type = other RNA
tttatgggagttctctgctgc

SEQ ID NO: 868 - RNA, 21 nt, synthetic construct
  source 1..21: mol_type = other RNA
tttcctcctcgcgtgatctcg

SEQ ID NO: 869 - RNA, 21 nt, synthetic construct
  source 1..21: mol_type = other RNA
tttgcctaggcttaaggggct

SEQ ID NO: 870 - RNA, 21 nt, synthetic construct
  source 1..21: mol_type = other RNA
ttttgcctaggcttaaggggc

SEQ ID NO: 871 - RNA, 22 nt, synthetic construct
  source 1..22: mol_type = other RNA
aaaagaatcccgcccataatcg

SEQ ID NO: 872 - RNA, 22 nt, synthetic construct
  source 1..22: mol_type = other RNA
aaagaatcccgcccataatcga

SEQ ID NO: 873 - RNA, 22 nt, synthetic construct
  source 1..22: mol_type = other RNA
aaaggagggagggcttcttcca

SEQ ID NO: 874 - RNA, 22 nt, synthetic construct
  source 1..22: mol_type = other RNA
aaatcttacagctgctcactcc

SEQ ID NO: 875 - RNA, 22 nt, synthetic construct
  source 1..22: mol_type = other RNA
aacgcccagggaccaagttagc

SEQ ID NO: 876 - RNA, 22 nt, synthetic construct
  source 1..22: mol_type = other RNA
aactcccataaaggtattgcgg

SEQ ID NO: 877 - RNA, 22 nt, synthetic construct
  source 1..22: mol_type = other RNA
aacttggtccctgggcgttgcc

SEQ ID NO: 878 - RNA, 22 nt, synthetic construct
  source 1..22: mol_type = other RNA
aagaagccctccctcctttcct

SEQ ID NO: 879 - RNA, 22 nt, synthetic construct
  source 1..22: mol_type = other RNA
aagaatcccgcccataatcgag

SEQ ID NO: 880 - RNA, 22 nt, synthetic construct
  source 1..22: mol_type = other RNA
aagacgggaggcagcagagaac

SEQ ID NO: 881 - RNA, 22 nt, synthetic construct
  source 1..22: mol_type = other RNA
aagccctccctcctttcctcct

SEQ ID NO: 882 - RNA, 22 nt, synthetic construct
  source 1..22: mol_type = other RNA
aagcctaggcaaaagaatcccg

SEQ ID NO: 883 - RNA, 22 nt, synthetic construct
  source 1..22: mol_type = other RNA
aagcgactcgacatggaggcga

SEQ ID NO: 884 - RNA, 22 nt, synthetic construct
  source 1..22: mol_type = other RNA
aaggaccgccctgggcctggaa

SEQ ID NO: 885 - RNA, 22 nt, synthetic construct
  source 1..22: mol_type = other RNA
aaggagggagggcttcttccag

SEQ ID NO: 886 - RNA, 22 nt, synthetic construct
  source 1..22: mol_type = other RNA
aaggggctaacttggtccctgg

SEQ ID NO: 887 - RNA, 22 nt, synthetic construct
  source 1..22: mol_type = other RNA
aagttagccccttaagcctagg

SEQ ID NO: 888 - RNA, 22 nt, synthetic construct
  source 1..22: mol_type = other RNA
aatacctttatgggagttctct

SEQ ID NO: 889 - RNA, 22 nt, synthetic construct
  source 1..22: mol_type = other RNA
aatcccgcccataatcgagaag

SEQ ID NO: 890 - RNA, 22 nt, synthetic construct
  source 1..22: mol_type = other RNA
aatcgagaagcgactcgacatg

SEQ ID NO: 891 - RNA, 22 nt, synthetic construct
  source 1..22: mol_type = other RNA
aatcttacagctgctcactccc

SEQ ID NO: 892 - RNA, 22 nt, synthetic construct
  source 1..22: mol_type = other RNA
acaagacgggaggcagcagaga

SEQ ID NO: 893 - RNA, 22 nt, synthetic construct
  source 1..22: mol_type = other RNA
acagctgctcactcccctgcag

SEQ ID NO: 894 - RNA, 22 nt, synthetic construct
  source 1..22: mol_type = other RNA
acatggaggcgatgacgagatc

SEQ ID NO: 895 - RNA, 22 nt, synthetic construct
  source 1..22: mol_type = other RNA
accaagttagccccttaagcct

SEQ ID NO: 896 - RNA, 22 nt, synthetic construct
  source 1..22: mol_type = other RNA
accgccctgggcctggaagaag

SEQ ID NO: 897 - RNA, 22 nt, synthetic construct
  source 1..22: mol_type = other RNA
acctttatgggagttctctgct

SEQ ID NO: 898 - RNA, 22 nt, synthetic construct
  source 1..22: mol_type = other RNA
acgagatcacgcgaggaggaaa

SEQ ID NO: 899 - RNA, 22 nt, synthetic construct
  source 1..22: mol_type = other RNA
acgcccagggaccaagttagcc

SEQ ID NO: 900 - RNA, 22 nt, synthetic construct
  source 1..22: mol_type = other RNA
acgcgaggaggaaaggagggag

SEQ ID NO: 901 - RNA, 22 nt, synthetic construct
  source 1..22: mol_type = other RNA
acgggaggcagcagagaactcc

SEQ ID NO: 902 - RNA, 22 nt, synthetic construct
  source 1..22: mol_type = other RNA
actcccataaaggtattgcggc

SEQ ID NO: 903 - RNA, 22 nt, synthetic construct
  source 1..22: mol_type = other RNA
actcccctgcagggcaacgccc

SEQ ID NO: 904 - RNA, 22 nt, synthetic construct
  source 1..22: mol_type = other RNA
actcgacatggaggcgatgacg

SEQ ID NO: 905 - RNA, 22 nt, synthetic construct
  source 1..22: mol_type = other RNA
acttggtccctgggcgttgccc

SEQ ID NO: 906 - RNA, 22 nt, synthetic construct
  source 1..22: mol_type = other RNA
agaactcccataaaggtattgc

SEQ ID NO: 907 - RNA, 22 nt, synthetic construct
  source 1..22: mol_type = other RNA
agaagccctccctcctttcctc

SEQ ID NO: 908 - RNA, 22 nt, synthetic construct
  source 1..22: mol_type = other RNA
agaagcgactcgacatggaggc

SEQ ID NO: 909 - RNA, 22 nt, synthetic construct
  source 1..22: mol_type = other RNA
agaatcccgcccataatcgaga

SEQ ID NO: 910 - RNA, 22 nt, synthetic construct
  source 1..22: mol_type = other RNA
agacgggaggcagcagagaact

SEQ ID NO: 911 - RNA, 22 nt, synthetic construct
  source 1..22: mol_type = other RNA
agagaactcccataaaggtatt

SEQ ID NO: 912 - RNA, 22 nt, synthetic construct
  source 1..22: mol_type = other RNA
agatcacgcgaggaggaaagga

SEQ ID NO: 913 - RNA, 22 nt, synthetic construct
  source 1..22: mol_type = other RNA
agcagagaactcccataaaggt

SEQ ID NO: 914 - RNA, 22 nt, synthetic construct
  source 1..22: mol_type = other RNA
agcagctgtaagatttgagggg

SEQ ID NO: 915 - RNA, 22 nt, synthetic construct
  source 1..22: mol_type = other RNA
agccccttaagcctaggcaaaa

SEQ ID NO: 916 - RNA, 22 nt, synthetic construct
  source 1..22: mol_type = other RNA
agccctccctcctttcctcctc

SEQ ID NO: 917 - RNA, 22 nt, synthetic construct
  source 1..22: mol_type = other RNA
agcctaggcaaaagaatcccgc

SEQ ID NO: 918 - RNA, 22 nt, synthetic construct
  source 1..22: mol_type = other RNA
agcgactcgacatggaggcgat

SEQ ID NO: 919 - RNA, 22 nt, synthetic construct
  source 1..22: mol_type = other RNA
agctgctcactcccctgcaggg

SEQ ID NO: 920 - RNA, 22 nt, synthetic construct
  source 1..22: mol_type = other RNA
aggaaaggagggagggcttctt

SEQ ID NO: 921 - RNA, 22 nt, synthetic construct
  source 1..22: mol_type = other RNA
aggaccgccctgggcctggaag

SEQ ID NO: 922 - RNA, 22 nt, synthetic construct
  source 1..22: mol_type = other RNA
aggaggaaaggagggagggctt

SEQ ID NO: 923 - RNA, 22 nt, synthetic construct
  source 1..22: mol_type = other RNA
aggagggagggcttcttccagg

SEQ ID NO: 924 - RNA, 22 nt, synthetic construct
  source 1..22: mol_type = other RNA
aggcaaaagaatcccgcccata

SEQ ID NO: 925 - RNA, 22 nt, synthetic construct
  source 1..22: mol_type = other RNA
aggcagcagagaactcccataa

SEQ ID NO: 926 - RNA, 22 nt, synthetic construct
  source 1..22: mol_type = other RNA
aggcccagggcggtccttacaa

SEQ ID NO: 927 - RNA, 22 nt, synthetic construct
  source 1..22: mol_type = other RNA
aggcgatgacgagatcacgcga

SEQ ID NO: 928 - RNA, 22 nt, synthetic construct
  source 1..22: mol_type = other RNA
aggcttaaggggctaacttggt

SEQ ID NO: 929 - RNA, 22 nt, synthetic construct
  source 1..22: mol_type = other RNA
agggaccaagttagccccttaa

SEQ ID NO: 930 - RNA, 22 nt, synthetic construct
  source 1..22: mol_type = other RNA
agggagggcttcttccaggccc

SEQ ID NO: 931 - RNA, 22 nt, synthetic construct
  source 1..22: mol_type = other RNA
agggcaacgcccagggaccaag

SEQ ID NO: 932 - RNA, 22 nt, synthetic construct
  source 1..22: mol_type = other RNA
agggcggtccttacaagacggg

SEQ ID NO: 933 - RNA, 22 nt, synthetic construct
  source 1..22: mol_type = other RNA
agggcttcttccaggcccaggg

SEQ ID NO: 934 - RNA, 22 nt, synthetic construct
  source 1..22: mol_type = other RNA
aggggagtgagcagctgtaaga

SEQ ID NO: 935 - RNA, 22 nt, synthetic construct
  source 1..22: mol_type = other RNA
aggggagtgccgcaataccttt

SEQ ID NO: 936 - RNA, 22 nt, synthetic construct
  source 1..22: mol_type = other RNA
aggggctaacttggtccctggg

SEQ ID NO: 937 - RNA, 22 nt, synthetic construct
  source 1..22: mol_type = other RNA
agtcgcccctcaaatcttacag

SEQ ID NO: 938 - RNA, 22 nt, synthetic construct
  source 1..22: mol_type = other RNA
agtcgcttctcgattatgggcg

SEQ ID NO: 939 - RNA, 22 nt, synthetic construct
  source 1..22: mol_type = other RNA
agtgagcagctgtaagatttga

SEQ ID NO: 940 - RNA, 22 nt, synthetic construct
  source 1..22: mol_type = other RNA
agtgccgcaatacctttatggg

SEQ ID NO: 941 - RNA, 22 nt, synthetic construct
  source 1..22: mol_type = other RNA
agttagccccttaagcctaggc

SEQ ID NO: 942 - RNA, 22 nt, synthetic construct
  source 1..22: mol_type = other RNA
agttctctgctgcctcccgtct

SEQ ID NO: 943 - RNA, 22 nt, synthetic construct
  source 1..22: mol_type = other RNA
ataatcgagaagcgactcgaca

SEQ ID NO: 944 - RNA, 22 nt, synthetic construct
  source 1..22: mol_type = other RNA
atacctttatgggagttctctg

SEQ ID NO: 945 - RNA, 22 nt, synthetic construct
  source 1..22: mol_type = other RNA
atcacgcgaggaggaaaggagg

SEQ ID NO: 946 - RNA, 22 nt, synthetic construct
  source 1..22: mol_type = other RNA
atcccgcccataatcgagaagc

SEQ ID NO: 947 - RNA, 22 nt, synthetic construct
  source 1..22: mol_type = other RNA
atcgagaagcgactcgacatgg

SEQ ID NO: 948 - RNA, 22 nt, synthetic construct
  source 1..22: mol_type = other RNA
atcgcctccatgtcgagtcgct

SEQ ID NO: 949 - RNA, 22 nt, synthetic construct
  source 1..22: mol_type = other RNA
atctcgtcatcgcctccatgtc

SEQ ID NO: 950 - RNA, 22 nt, synthetic construct
  source 1..22: mol_type = other RNA
atcttacagctgctcactcccc

SEQ ID NO: 951 - RNA, 22 nt, synthetic construct
  source 1..22: mol_type = other RNA
atgacgagatcacgcgaggagg

SEQ ID NO: 952 - RNA, 22 nt, synthetic construct
  source 1..22: mol_type = other RNA
atggaggcgatgacgagatcac

SEQ ID NO: 953 - RNA, 22 nt, synthetic construct
  source 1..22: mol_type = other RNA
atgggagttctctgctgcctcc

SEQ ID NO: 954 - RNA, 22 nt, synthetic construct
  source 1..22: mol_type = other RNA
atgggcgggattcttttgccta

SEQ ID NO: 955 - RNA, 22 nt, synthetic construct
  source 1..22: mol_type = other RNA
atgtcgagtcgcttctcgatta

SEQ ID NO: 956 - RNA, 22 nt, synthetic construct
  source 1..22: mol_type = other RNA
attatgggcgggattcttttgc

SEQ ID NO: 957 - RNA, 22 nt, synthetic construct
  source 1..22: mol_type = other RNA
attcttttgcctaggcttaagg

SEQ ID NO: 958 - RNA, 22 nt, synthetic construct
  source 1..22: mol_type = other RNA
caaaagaatcccgcccataatc

SEQ ID NO: 959 - RNA, 22 nt, synthetic construct
  source 1..22: mol_type = other RNA
caaatcttacagctgctcactc

SEQ ID NO: 960 - RNA, 22 nt, synthetic construct
  source 1..22: mol_type = other RNA
caacgcccagggaccaagttag

SEQ ID NO: 961 - RNA, 22 nt, synthetic construct
  source 1..22: mol_type = other RNA
caagacgggaggcagcagagaa

SEQ ID NO: 962 - RNA, 22 nt, synthetic construct
  source 1..22: mol_type = other RNA
caagttagccccttaagcctag

SEQ ID NO: 963 - RNA, 22 nt, synthetic construct
  source 1..22: mol_type = other RNA
caatacctttatgggagttctc

SEQ ID NO: 964 - RNA, 22 nt, synthetic construct
  source 1..22: mol_type = other RNA
cacgcgaggaggaaaggaggga

SEQ ID NO: 965 - RNA, 22 nt, synthetic construct
  source 1..22: mol_type = other RNA
cactcccctgcagggcaacgcc

SEQ ID NO: 966 - RNA, 22 nt, synthetic construct
  source 1..22: mol_type = other RNA
cagagaactcccataaaggtat

SEQ ID NO: 967 - RNA, 22 nt, synthetic construct
  source 1..22: mol_type = other RNA
cagcagagaactcccataaagg

SEQ ID NO: 968 - RNA, 22 nt, synthetic construct
  source 1..22: mol_type = other RNA
cagctgctcactcccctgcagg

SEQ ID NO: 969 - RNA, 22 nt, synthetic construct
  source 1..22: mol_type = other RNA
caggcccagggcggtccttaca

SEQ ID NO: 970 - RNA, 22 nt, synthetic construct
  source 1..22: mol_type = other RNA
cagggaccaagttagcccctta

SEQ ID NO: 971 - RNA, 22 nt, synthetic construct
  source 1..22: mol_type = other RNA
cagggcaacgcccagggaccaa

SEQ ID NO: 972 - RNA, 22 nt, synthetic construct
  source 1..22: mol_type = other RNA
cagggcggtccttacaagacgg

SEQ ID NO: 973 - RNA, 22 nt, synthetic construct
  source 1..22: mol_type = other RNA
caggggagtgagcagctgtaag

SEQ ID NO: 974 - RNA, 22 nt, synthetic construct
  source 1..22: mol_type = other RNA
cataatcgagaagcgactcgac

SEQ ID NO: 975 - RNA, 22 nt, synthetic construct
  source 1..22: mol_type = other RNA
catcgcctccatgtcgagtcgc

SEQ ID NO: 976 - RNA, 22 nt, synthetic construct
  source 1..22: mol_type = other RNA
catggaggcgatgacgagatca

SEQ ID NO: 977 - RNA, 22 nt, synthetic construct
  source 1..22: mol_type = other RNA
catgtcgagtcgcttctcgatt

SEQ ID NO: 978 - RNA, 22 nt, synthetic construct
  source 1..22: mol_type = other RNA
ccaagttagccccttaagccta

SEQ ID NO: 979 - RNA, 22 nt, synthetic construct
  source 1..22: mol_type = other RNA
ccaggcccagggcggtccttac

SEQ ID NO: 980 - RNA, 22 nt, synthetic construct
  source 1..22: mol_type = other RNA
ccagggaccaagttagcccctt

SEQ ID NO: 981 - RNA, 22 nt, synthetic construct
  source 1..22: mol_type = other RNA
ccagggcggtccttacaagacg

SEQ ID NO: 982 - RNA, 22 nt, synthetic construct
  source 1..22: mol_type = other RNA
ccataaaggtattgcggcactc

SEQ ID NO: 983 - RNA, 22 nt, synthetic construct
  source 1..22: mol_type = other RNA
ccataatcgagaagcgactcga

SEQ ID NO: 984 - RNA, 22 nt, synthetic construct
  source 1..22: mol_type = other RNA
ccatgtcgagtcgcttctcgat

SEQ ID NO: 985 - RNA, 22 nt, synthetic construct
  source 1..22: mol_type = other RNA
cccagggaccaagttagcccct

SEQ ID NO: 986 - RNA, 22 nt, synthetic construct
  source 1..22: mol_type = other RNA
cccagggcggtccttacaagac

SEQ ID NO: 987 - RNA, 22 nt, synthetic construct
  source 1..22: mol_type = other RNA
cccataaaggtattgcggcact

SEQ ID NO: 988 - RNA, 22 nt, synthetic construct
  source 1..22: mol_type = other RNA
cccataatcgagaagcgactcg

SEQ ID NO: 989 - RNA, 22 nt, synthetic construct
  source 1..22: mol_type = other RNA
cccctcaaatcttacagctgct

SEQ ID NO: 990 - RNA, 22 nt, synthetic construct
  source 1..22: mol_type = other RNA
cccctgcagggcaacgcccagg

SEQ ID NO: 991 - RNA, 22 nt, synthetic construct
  source 1..22: mol_type = other RNA
ccccttaagcctaggcaaaaga

SEQ ID NO: 992 - RNA, 22 nt, synthetic construct
  source 1..22: mol_type = other RNA
cccgcccataatcgagaagcga

SEQ ID NO: 993 - RNA, 22 nt, synthetic construct
  source 1..22: mol_type = other RNA
cccgtcttgtaaggaccgccct

SEQ ID NO: 994 - RNA, 22 nt, synthetic construct
  source 1..22: mol_type = other RNA
ccctcaaatcttacagctgctc

SEQ ID NO: 995 - RNA, 22 nt, synthetic construct
  source 1..22: mol_type = other RNA
ccctccctcctttcctcctcgc

SEQ ID NO: 996 - RNA, 22 nt, synthetic construct
  source 1..22: mol_type = other RNA
ccctcctttcctcctcgcgtga

SEQ ID NO: 997 - RNA, 22 nt, synthetic construct
  source 1..22: mol_type = other RNA
ccctgcagggcaacgcccaggg

SEQ ID NO: 998 - RNA, 22 nt, synthetic construct
  source 1..22: mol_type = other RNA
ccctgcaggggagtgagcagct

SEQ ID NO: 999 - RNA, 22 nt, synthetic construct
  source 1..22: mol_type = other RNA
ccctgggcctggaagaagccct

SEQ ID NO: 1000 - RNA, 22 nt, synthetic construct
  source 1..22: mol_type = other RNA
ccctgggcgttgccctgcaggg

SEQ ID NO: 1001 - RNA, 22 nt, synthetic construct
  source 1..22: mol_type = other RNA
cccttaagcctaggcaaaagaa

SEQ ID NO: 1002 - RNA, 22 nt, synthetic construct
  source 1..22: mol_type = other RNA
ccgcaatacctttatgggagtt

SEQ ID NO: 1003 - RNA, 22 nt, synthetic construct
  source 1..22: mol_type = other RNA
ccgcccataatcgagaagcgac

SEQ ID NO: 1004 - RNA, 22 nt, synthetic construct
  source 1..22: mol_type = other RNA
ccgccctgggcctggaagaagc

SEQ ID NO: 1005 - RNA, 22 nt, synthetic construct
  source 1..22: mol_type = other RNA
ccgtcttgtaaggaccgccctg

SEQ ID NO: 1006 - RNA, 22 nt, synthetic construct
  source 1..22: mol_type = other RNA
cctaggcaaaagaatcccgccc

SEQ ID NO: 1007 - RNA, 22 nt, synthetic construct
  source 1..22: mol_type = other RNA
cctaggcttaaggggctaactt

SEQ ID NO: 1008 - RNA, 22 nt, synthetic construct
  source 1..22: mol_type = other RNA
cctcaaatcttacagctgctca

SEQ ID NO: 1009 - RNA, 22 nt, synthetic construct
  source 1..22: mol_type = other RNA
cctccatgtcgagtcgcttctc

SEQ ID NO: 1010 - RNA, 22 nt, synthetic construct
  source 1..22: mol_type = other RNA
cctcccgtcttgtaaggaccgc

SEQ ID NO: 1011 - RNA, 22 nt, synthetic construct
  source 1..22: mol_type = other RNA
cctccctcctttcctcctcgcg

SEQ ID NO: 1012 - RNA, 22 nt, synthetic construct
  source 1..22: mol_type = other RNA
cctcctcgcgtgatctcgtcat

SEQ ID NO: 1013 - RNA, 22 nt, synthetic construct
  source 1..22: mol_type = other RNA
cctcctttcctcctcgcgtgat

SEQ ID NO: 1014 - RNA, 22 nt, synthetic construct
  source 1..22: mol_type = other RNA
cctcgcgtgatctcgtcatcgc

SEQ ID NO: 1015 - RNA, 22 nt, synthetic construct
  source 1..22: mol_type = other RNA
cctgcagggcaacgcccaggga

SEQ ID NO: 1016 - RNA, 22 nt, synthetic construct
  source 1..22: mol_type = other RNA
cctgcaggggagtgagcagctg

SEQ ID NO: 1017 - RNA, 22 nt, synthetic construct
  source 1..22: mol_type = other RNA
cctggaagaagccctccctcct

SEQ ID NO: 1018 - RNA, 22 nt, synthetic construct
  source 1..22: mol_type = other RNA
cctgggcctggaagaagccctc

SEQ ID NO: 1019 - RNA, 22 nt, synthetic construct
  source 1..22: mol_type = other RNA
cctgggcgttgccctgcagggg

SEQ ID NO: 1020 - RNA, 22 nt, synthetic construct
  source 1..22: mol_type = other RNA
ccttaagcctaggcaaaagaat

SEQ ID NO: 1021 - RNA, 22 nt, synthetic construct
  source 1..22: mol_type = other RNA
ccttacaagacgggaggcagca

SEQ ID NO: 1022 - RNA, 22 nt, synthetic construct
  source 1..22: mol_type = other RNA
cctttatgggagttctctgctg

SEQ ID NO: 1023 - RNA, 22 nt, synthetic construct
  source 1..22: mol_type = other RNA
cctttcctcctcgcgtgatctc

SEQ ID NO: 1024 - RNA, 22 nt, synthetic construct
  source 1..22: mol_type = other RNA
cgacatggaggcgatgacgaga

SEQ ID NO: 1025 - RNA, 22 nt, synthetic construct
  source 1..22: mol_type = other RNA
cgactcgacatggaggcgatga

SEQ ID NO: 1026 - RNA, 22 nt, synthetic construct
  source 1..22: mol_type = other RNA
cgagaagcgactcgacatggag

SEQ ID NO: 1027 - RNA, 22 nt, synthetic construct
  source 1..22: mol_type = other RNA
cgagatcacgcgaggaggaaag

SEQ ID NO: 1028 - RNA, 22 nt, synthetic construct
  source 1..22: mol_type = other RNA
cgaggaggaaaggagggagggc

SEQ ID NO: 1029 - RNA, 22 nt, synthetic construct
  source 1..22: mol_type = other RNA
cgagtcgcttctcgattatggg

SEQ ID NO: 1030 - RNA, 22 nt, synthetic construct
  source 1..22: mol_type = other RNA
cgatgacgagatcacgcgagga

SEQ ID NO: 1031 - RNA, 22 nt, synthetic construct
  source 1..22: mol_type = other RNA
cgattatgggcgggattctttt

SEQ ID NO: 1032 - RNA, 22 nt, synthetic construct
  source 1..22: mol_type = other RNA
cgcaatacctttatgggagttc

SEQ ID NO: 1033 - RNA, 22 nt, synthetic construct
  source 1..22: mol_type = other RNA
cgcccagggaccaagttagccc

SEQ ID NO: 1034 - RNA, 22 nt, synthetic construct
  source 1..22: mol_type = other RNA
cgcccataatcgagaagcgact

SEQ ID NO: 1035 - RNA, 22 nt, synthetic construct
  source 1..22: mol_type = other RNA
cgcccctcaaatcttacagctg

SEQ ID NO: 1036 - RNA, 22 nt, synthetic construct
  source 1..22: mol_type = other RNA
cgccctgggcctggaagaagcc

SEQ ID NO: 1037 - RNA, 22 nt, synthetic construct
  source 1..22: mol_type = other RNA
cgcctccatgtcgagtcgcttc

SEQ ID NO: 1038 - RNA, 22 nt, synthetic construct
  source 1..22: mol_type = other RNA
cgcgaggaggaaaggagggagg

SEQ ID NO: 1039 - RNA, 22 nt, synthetic construct
  source 1..22: mol_type = other RNA
cgcgtgatctcgtcatcgcctc

SEQ ID NO: 1040 - RNA, 22 nt, synthetic construct
  source 1..22: mol_type = other RNA
cgcttctcgattatgggcggga

SEQ ID NO: 1041 - RNA, 22 nt, synthetic construct
  source 1..22: mol_type = other RNA
cggagtcgcccctcaaatctta

SEQ ID NO: 1042 - RNA, 22 nt, synthetic construct
  source 1..22: mol_type = other RNA
cgggaggcagcagagaactccc

SEQ ID NO: 1043 - RNA, 22 nt, synthetic construct
  source 1..22: mol_type = other RNA
cgggattcttttgcctaggctt

SEQ ID NO: 1044 - RNA, 22 nt, synthetic construct
  source 1..22: mol_type = other RNA
cggtccttacaagacgggaggc

SEQ ID NO: 1045 - RNA, 22 nt, synthetic construct
  source 1..22: mol_type = other RNA
cgtcatcgcctccatgtcgagt

SEQ ID NO: 1046 - RNA, 22 nt, synthetic construct
  source 1..22: mol_type = other RNA
cgtcttgtaaggaccgccctgg

SEQ ID NO: 1047 - RNA, 22 nt, synthetic construct
  source 1..22: mol_type = other RNA
cgtgatctcgtcatcgcctcca

SEQ ID NO: 1048 - RNA, 22 nt, synthetic construct
  source 1..22: mol_type = other RNA
cgttgccctgcaggggagtgag

SEQ ID NO: 1049 - RNA, 22 nt, synthetic construct
  source 1..22: mol_type = other RNA
ctaacttggtccctgggcgttg

SEQ ID NO: 1050 - RNA, 22 nt, synthetic construct
  source 1..22: mol_type = other RNA
ctaggcaaaagaatcccgccca

SEQ ID NO: 1051 - RNA, 22 nt, synthetic construct
  source 1..22: mol_type = other RNA
ctaggcttaaggggctaacttg

SEQ ID NO: 1052 - RNA, 22 nt, synthetic construct
  source 1..22: mol_type = other RNA
ctcaaatcttacagctgctcac

SEQ ID NO: 1053 - RNA, 22 nt, synthetic construct
  source 1..22: mol_type = other RNA
ctcactcccctgcagggcaacg

SEQ ID NO: 1054 - RNA, 22 nt, synthetic construct
  source 1..22: mol_type = other RNA
ctccatgtcgagtcgcttctcg

SEQ ID NO: 1055 - RNA, 22 nt, synthetic construct
  source 1..22: mol_type = other RNA
ctcccataaaggtattgcggca

SEQ ID NO: 1056 - RNA, 22 nt, synthetic construct
  source 1..22: mol_type = other RNA
ctcccctgcagggcaacgccca

SEQ ID NO: 1057 - RNA, 22 nt, synthetic construct
  source 1..22: mol_type = other RNA
ctcccgtcttgtaaggaccgcc

SEQ ID NO: 1058 - RNA, 22 nt, synthetic construct
  source 1..22: mol_type = other RNA
ctccctcctttcctcctcgcgt

SEQ ID NO: 1059 - RNA, 22 nt, synthetic construct
  source 1..22: mol_type = other RNA
ctcctcgcgtgatctcgtcatc

SEQ ID NO: 1060 - RNA, 22 nt, synthetic construct
  source 1..22: mol_type = other RNA
ctcctttcctcctcgcgtgatc

SEQ ID NO: 1061 - RNA, 22 nt, synthetic construct
  source 1..22: mol_type = other RNA
ctcgacatggaggcgatgacga

SEQ ID NO: 1062 - RNA, 22 nt, synthetic construct
  source 1..22: mol_type = other RNA
ctcgattatgggcgggattctt

SEQ ID NO: 1063 - RNA, 22 nt, synthetic construct
  source 1..22: mol_type = other RNA
ctcgcgtgatctcgtcatcgcc

SEQ ID NO: 1064 - RNA, 22 nt, synthetic construct
  source 1..22: mol_type = other RNA
ctcgtcatcgcctccatgtcga

SEQ ID NO: 1065 - RNA, 22 nt, synthetic construct
  source 1..22: mol_type = other RNA
ctctgctgcctcccgtcttgta

SEQ ID NO: 1066 - RNA, 22 nt, synthetic construct
  source 1..22: mol_type = other RNA
ctgcagggcaacgcccagggac

SEQ ID NO: 1067 - RNA, 22 nt, synthetic construct
  source 1..22: mol_type = other RNA
ctgcaggggagtgagcagctgt

SEQ ID NO: 1068 - RNA, 22 nt, synthetic construct
  source 1..22: mol_type = other RNA
ctgcctcccgtcttgtaaggac

SEQ ID NO: 1069 - RNA, 22 nt, synthetic construct
  source 1..22: mol_type = other RNA
ctgctcactcccctgcagggca

SEQ ID NO: 1070 - RNA, 22 nt, synthetic construct
  source 1..22: mol_type = other RNA
ctgctgcctcccgtcttgtaag

SEQ ID NO: 1071 - RNA, 22 nt, synthetic construct
  source 1..22: mol_type = other RNA
ctggaagaagccctccctcctt

SEQ ID NO: 1072 - RNA, 22 nt, synthetic construct
  source 1..22: mol_type = other RNA
ctgggcctggaagaagccctcc

SEQ ID NO: 1073 - RNA, 22 nt, synthetic construct
  source 1..22: mol_type = other RNA
ctgggcgttgccctgcagggga

SEQ ID NO: 1074 - RNA, 22 nt, synthetic construct
  source 1..22: mol_type = other RNA
cttaagcctaggcaaaagaatc

SEQ ID NO: 1075 - RNA, 22 nt, synthetic construct
  source 1..22: mol_type = other RNA
cttaaggggctaacttggtccc

SEQ ID NO: 1076 - RNA, 22 nt, synthetic construct
  source 1..22: mol_type = other RNA
cttacaagacgggaggcagcag

SEQ ID NO: 1077 - RNA, 22 nt, synthetic construct
  source 1..22: mol_type = other RNA
cttacagctgctcactcccctg

SEQ ID NO: 1078 - RNA, 22 nt, synthetic construct
  source 1..22: mol_type = other RNA
cttccaggcccagggcggtcct

SEQ ID NO: 1079 - RNA, 22 nt, synthetic construct
  source 1..22: mol_type = other RNA
cttctcgattatgggcgggatt

SEQ ID NO: 1080 - RNA, 22 nt, synthetic construct
  source 1..22: mol_type = other RNA
cttcttccaggcccagggcggt

SEQ ID NO: 1081 - RNA, 22 nt, synthetic construct
  source 1..22: mol_type = other RNA
cttggtccctgggcgttgccct

SEQ ID NO: 1082 - RNA, 22 nt, synthetic construct
  source 1..22: mol_type = other RNA
cttgtaaggaccgccctgggcc

SEQ ID NO: 1083 - RNA, 22 nt, synthetic construct
  source 1..22: mol_type = other RNA
ctttatgggagttctctgctgc

SEQ ID NO: 1084 - RNA, 22 nt, synthetic construct
  source 1..22: mol_type = other RNA
ctttcctcctcgcgtgatctcg

SEQ ID NO: 1085 - RNA, 22 nt, synthetic construct
  source 1..22: mol_type = other RNA
cttttgcctaggcttaaggggc

SEQ ID NO: 1086 - RNA, 22 nt, synthetic construct
  source 1..22: mol_type = other RNA
gaaaggagggagggcttcttcc

SEQ ID NO: 1087 - RNA, 22 nt, synthetic construct
  source 1..22: mol_type = other RNA
gaactcccataaaggtattgcg

SEQ ID NO: 1088 - RNA, 22 nt, synthetic construct
  source 1..22: mol_type = other RNA
gaagaagccctccctcctttcc

SEQ ID NO: 1089 - RNA, 22 nt, synthetic construct
  source 1..22: mol_type = other RNA
gaagccctccctcctttcctcc

SEQ ID NO: 1090 - RNA, 22 nt, synthetic construct
  source 1..22: mol_type = other RNA
gaagcgactcgacatggaggcg

SEQ ID NO: 1091 - RNA, 22 nt, synthetic construct
  source 1..22: mol_type = other RNA
gaatcccgcccataatcgagaa

SEQ ID NO: 1092 - RNA, 22 nt, synthetic construct
  source 1..22: mol_type = other RNA
gacatggaggcgatgacgagat

SEQ ID NO: 1093 - RNA, 22 nt, synthetic construct
  source 1..22: mol_type = other RNA
gaccaagttagccccttaagcc

SEQ ID NO: 1094 - RNA, 22 nt, synthetic construct
  source 1..22: mol_type = other RNA
gaccgccctgggcctggaagaa

SEQ ID NO: 1095 - RNA, 22 nt, synthetic construct
  source 1..22: mol_type = other RNA
gacgagatcacgcgaggaggaa

SEQ ID NO: 1096 - RNA, 22 nt, synthetic construct
  source 1..22: mol_type = other RNA
gacgggaggcagcagagaactc

SEQ ID NO: 1097 - RNA, 22 nt, synthetic construct
  source 1..22: mol_type = other RNA
gactcgacatggaggcgatgac

SEQ ID NO: 1098 - RNA, 22 nt, synthetic construct
  source 1..22: mol_type = other RNA
gagaactcccataaaggtattg

SEQ ID NO: 1099 - RNA, 22 nt, synthetic construct
  source 1..22: mol_type = other RNA
gagaagcgactcgacatggagg

SEQ ID NO: 1100 - RNA, 22 nt, synthetic construct
  source 1..22: mol_type = other RNA
gagatcacgcgaggaggaaagg

SEQ ID NO: 1101 - RNA, 22 nt, synthetic construct
  source 1..22: mol_type = other RNA
gagcagctgtaagatttgaggg

SEQ ID NO: 1102 - RNA, 22 nt, synthetic construct
  source 1..22: mol_type = other RNA
gaggaaaggagggagggcttct

SEQ ID NO: 1103 - RNA, 22 nt, synthetic construct
  source 1..22: mol_type = other RNA
gaggaggaaaggagggagggct

SEQ ID NO: 1104 - RNA, 22 nt, synthetic construct
  source 1..22: mol_type = other RNA
gaggcagcagagaactcccata

SEQ ID NO: 1105 - RNA, 22 nt, synthetic construct
  source 1..22: mol_type = other RNA
gaggcgatgacgagatcacgcg

SEQ ID NO: 1106 - RNA, 22 nt, synthetic construct
  source 1..22: mol_type = other RNA
gagggagggcttcttccaggcc

SEQ ID NO: 1107 - RNA, 22 nt, synthetic construct
  source 1..22: mol_type = other RNA
gagggcttcttccaggcccagg

SEQ ID NO: 1108 - RNA, 22 nt, synthetic construct
  source 1..22: mol_type = other RNA
gaggggagtgccgcaatacctt

SEQ ID NO: 1109 - RNA, 22 nt, synthetic construct
  source 1..22: mol_type = other RNA
gagtcgcccctcaaatcttaca

SEQ ID NO: 1110 - RNA, 22 nt, synthetic construct
  source 1..22: mol_type = other RNA
gagtcgcttctcgattatgggc

SEQ ID NO: 1111 - RNA, 22 nt, synthetic construct
  source 1..22: mol_type = other RNA
gagtgagcagctgtaagatttg

SEQ ID NO: 1112 - RNA, 22 nt, synthetic construct
  source 1..22: mol_type = other RNA
gagtgccgcaatacctttatgg

SEQ ID NO: 1113 - RNA, 22 nt, synthetic construct
  source 1..22: mol_type = other RNA
gagttctctgctgcctcccgtc

SEQ ID NO: 1114 - RNA, 22 nt, synthetic construct
  source 1..22: mol_type = other RNA
gatcacgcgaggaggaaaggag

SEQ ID NO: 1115 - RNA, 22 nt, synthetic construct
  source 1..22: mol_type = other RNA
gatctcgtcatcgcctccatgt

SEQ ID NO: 1116 - RNA, 22 nt, synthetic construct
  source 1..22: mol_type = other RNA
gatgacgagatcacgcgaggag

SEQ ID NO: 1117 - RNA, 22 nt, synthetic construct
  source 1..22: mol_type = other RNA
gattatgggcgggattcttttg

SEQ ID NO: 1118 - RNA, 22 nt, synthetic construct
  source 1..22: mol_type = other RNA
gattcttttgcctaggcttaag

SEQ ID NO: 1119 - RNA, 22 nt, synthetic construct
  source 1..22: mol_type = other RNA
gcaaaagaatcccgcccataat

SEQ ID NO: 1120 - RNA, 22 nt, synthetic construct
  source 1..22: mol_type = other RNA
gcaacgcccagggaccaagtta

SEQ ID NO: 1121 - RNA, 22 nt, synthetic construct
  source 1..22: mol_type = other RNA
gcaatacctttatgggagttct

SEQ ID NO: 1122 - RNA, 22 nt, synthetic construct
  source 1..22: mol_type = other RNA
gcagagaactcccataaaggta

SEQ ID NO: 1123 - RNA, 22 nt, synthetic construct
  source 1..22: mol_type = other RNA
gcagcagagaactcccataaag

SEQ ID NO: 1124 - RNA, 22 nt, synthetic construct
  source 1..22: mol_type = other RNA
gcagggcaacgcccagggacca

SEQ ID NO: 1125 - RNA, 22 nt, synthetic construct
  source 1..22: mol_type = other RNA
gcaggggagtgagcagctgtaa

SEQ ID NO: 1126 - RNA, 22 nt, synthetic construct
  source 1..22: mol_type = other RNA
gcccagggaccaagttagcccc

SEQ ID NO: 1127 - RNA, 22 nt, synthetic construct
  source 1..22: mol_type = other RNA
gcccagggcggtccttacaaga

SEQ ID NO: 1128 - RNA, 22 nt, synthetic construct
  source 1..22: mol_type = other RNA
gcccataatcgagaagcgactc

SEQ ID NO: 1129 - RNA, 22 nt, synthetic construct
  source 1..22: mol_type = other RNA
gcccctcaaatcttacagctgc

SEQ ID NO: 1130 - RNA, 22 nt, synthetic construct
  source 1..22: mol_type = other RNA
gccccttaagcctaggcaaaag

SEQ ID NO: 1131 - RNA, 22 nt, synthetic construct
  source 1..22: mol_type = other RNA
gccctccctcctttcctcctcg

SEQ ID NO: 1132 - RNA, 22 nt, synthetic construct
  source 1..22: mol_type = other RNA
gccctgcaggggagtgagcagc

SEQ ID NO: 1133 - RNA, 22 nt, synthetic construct
  source 1..22: mol_type = other RNA
gccctgggcctggaagaagccc

SEQ ID NO: 1134 - RNA, 22 nt, synthetic construct
  source 1..22: mol_type = other RNA
gccgcaatacctttatgggagt

SEQ ID NO: 1135 - RNA, 22 nt, synthetic construct
  source 1..22: mol_type = other RNA
gcctaggcaaaagaatcccgcc

SEQ ID NO: 1136 - RNA, 22 nt, synthetic construct
  source 1..22: mol_type = other RNA
gcctaggcttaaggggctaact

SEQ ID NO: 1137 - RNA, 22 nt, synthetic construct
  source 1..22: mol_type = other RNA
gcctccatgtcgagtcgcttct

SEQ ID NO: 1138 - RNA, 22 nt, synthetic construct
  source 1..22: mol_type = other RNA
gcctcccgtcttgtaaggaccg

SEQ ID NO: 1139 - RNA, 22 nt, synthetic construct
  source 1..22: mol_type = other RNA
gcctggaagaagccctccctcc

SEQ ID NO: 1140 - RNA, 22 nt, synthetic construct
  source 1..22: mol_type = other RNA
gcgactcgacatggaggcgatg

SEQ ID NO: 1141 - RNA, 22 nt, synthetic construct
  source 1..22: mol_type = other RNA
gcgaggaggaaaggagggaggg

SEQ ID NO: 1142 - RNA, 22 nt, synthetic construct
  source 1..22: mol_type = other RNA
gcgatgacgagatcacgcgagg

SEQ ID NO: 1143 - RNA, 22 nt, synthetic construct
  source 1..22: mol_type = other RNA
gcgggattcttttgcctaggct

SEQ ID NO: 1144 - RNA, 22 nt, synthetic construct
  source 1..22: mol_type = other RNA
gcggtccttacaagacgggagg

SEQ ID NO: 1145 - RNA, 22 nt, synthetic construct
  source 1..22: mol_type = other RNA
gcgtgatctcgtcatcgcctcc

SEQ ID NO: 1146 - RNA, 22 nt, synthetic construct
  source 1..22: mol_type = other RNA
gcgttgccctgcaggggagtga

SEQ ID NO: 1147 - RNA, 22 nt, synthetic construct
  source 1..22: mol_type = other RNA
gctaacttggtccctgggcgtt

SEQ ID NO: 1148 - RNA, 22 nt, synthetic construct
  source 1..22: mol_type = other RNA
gctcactcccctgcagggcaac

SEQ ID NO: 1149 - RNA, 22 nt, synthetic construct
  source 1..22: mol_type = other RNA
gctgcctcccgtcttgtaagga

SEQ ID NO: 1150 - RNA, 22 nt, synthetic construct
  source 1..22: mol_type = other RNA
gctgctcactcccctgcagggc

SEQ ID NO: 1151 - RNA, 22 nt, synthetic construct
  source 1..22: mol_type = other RNA
gcttaaggggctaacttggtcc

SEQ ID NO: 1152 - RNA, 22 nt, synthetic construct
  source 1..22: mol_type = other RNA
gcttctcgattatgggcgggat

SEQ ID NO: 1153 - RNA, 22 nt, synthetic construct
  source 1..22: mol_type = other RNA
gcttcttccaggcccagggcgg

SEQ ID NO: 1154 - RNA, 22 nt, synthetic construct
  source 1..22: mol_type = other RNA
ggaaaggagggagggcttcttc

SEQ ID NO: 1155 - RNA, 22 nt, synthetic construct
  source 1..22: mol_type = other RNA
ggaagaagccctccctcctttc

SEQ ID NO: 1156 - RNA, 22 nt, synthetic construct
  source 1..22: mol_type = other RNA
ggaccaagttagccccttaagc

SEQ ID NO: 1157 - RNA, 22 nt, synthetic construct
  source 1..22: mol_type = other RNA
ggaccgccctgggcctggaaga

SEQ ID NO: 1158 - RNA, 22 nt, synthetic construct
  source 1..22: mol_type = other RNA
ggaggaaaggagggagggcttc

SEQ ID NO: 1159 - RNA, 22 nt, synthetic construct
  source 1..22: mol_type = other RNA
ggaggcagcagagaactcccat

SEQ ID NO: 1160 - RNA, 22 nt, synthetic construct
  source 1..22: mol_type = other RNA
ggaggcgatgacgagatcacgc

SEQ ID NO: 1161 - RNA, 22 nt, synthetic construct
  source 1..22: mol_type = other RNA
ggagggagggcttcttccaggc

SEQ ID NO: 1162 - RNA, 22 nt, synthetic construct
  source 1..22: mol_type = other RNA
ggagggcttcttccaggcccag

SEQ ID NO: 1163 - RNA, 22 nt, synthetic construct
  source 1..22: mol_type = other RNA
ggaggggagtgccgcaatacct

SEQ ID NO: 1164 - RNA, 22 nt, synthetic construct
  source 1..22: mol_type = other RNA
ggagtcgcccctcaaatcttac

SEQ ID NO: 1165 - RNA, 22 nt, synthetic construct
  source 1..22: mol_type = other RNA
ggagtgagcagctgtaagattt

SEQ ID NO: 1166 - RNA, 22 nt, synthetic construct
  source 1..22: mol_type = other RNA
ggagtgccgcaatacctttatg

SEQ ID NO: 1167 - RNA, 22 nt, synthetic construct
  source 1..22: mol_type = other RNA
ggagttctctgctgcctcccgt

SEQ ID NO: 1168 - RNA, 22 nt, synthetic construct
  source 1..22: mol_type = other RNA
ggattcttttgcctaggcttaa

SEQ ID NO: 1169 - RNA, 22 nt, synthetic construct
  source 1..22: mol_type = other RNA
ggcaaaagaatcccgcccataa

SEQ ID NO: 1170 - RNA, 22 nt, synthetic construct
  source 1..22: mol_type = other RNA
ggcaacgcccagggaccaagtt

SEQ ID NO: 1171 - RNA, 22 nt, synthetic construct
  source 1..22: mol_type = other RNA
ggcagcagagaactcccataaa

SEQ ID NO: 1172 - RNA, 22 nt, synthetic construct
  source 1..22: mol_type = other RNA
ggcccagggcggtccttacaag

SEQ ID NO: 1173 - RNA, 22 nt, synthetic construct
  source 1..22: mol_type = other RNA
ggcctggaagaagccctccctc

SEQ ID NO: 1174 - RNA, 22 nt, synthetic construct
  source 1..22: mol_type = other RNA
ggcgatgacgagatcacgcgag

SEQ ID NO: 1175 - RNA, 22 nt, synthetic construct
  source 1..22: mol_type = other RNA
ggcgggattcttttgcctaggc

SEQ ID NO: 1176 - RNA, 22 nt, synthetic construct
  source 1..22: mol_type = other RNA
ggcggtccttacaagacgggag

SEQ ID NO: 1177 - RNA, 22 nt, synthetic construct
  source 1..22: mol_type = other RNA
ggcgttgccctgcaggggagtg

SEQ ID NO: 1178 - RNA, 22 nt, synthetic construct
  source 1..22: mol_type = other RNA
ggctaacttggtccctgggcgt

SEQ ID NO: 1179 - RNA, 22 nt, synthetic construct
  source 1..22: mol_type = other RNA
ggcttaaggggctaacttggtc

SEQ ID NO: 1180 - RNA, 22 nt, synthetic construct
  source 1..22: mol_type = other RNA
ggcttcttccaggcccagggcg

SEQ ID NO: 1181 - RNA, 22 nt, synthetic construct
  source 1..22: mol_type = other RNA
gggaccaagttagccccttaag

SEQ ID NO: 1182 - RNA, 22 nt, synthetic construct
  source 1..22: mol_type = other RNA
gggaggcagcagagaactccca

SEQ ID NO: 1183 - RNA, 22 nt, synthetic construct
  source 1..22: mol_type = other RNA
gggagggcttcttccaggccca

SEQ ID NO: 1184 - RNA, 22 nt, synthetic construct
  source 1..22: mol_type = other RNA
gggaggggagtgccgcaatacc

SEQ ID NO: 1185 - RNA, 22 nt, synthetic construct
  source 1..22: mol_type = other RNA
gggagtgagcagctgtaagatt

SEQ ID NO: 1186 - RNA, 22 nt, synthetic construct
  source 1..22: mol_type = other RNA
gggagtgccgcaatacctttat

SEQ ID NO: 1187 - RNA, 22 nt, synthetic construct
  source 1..22: mol_type = other RNA
gggagttctctgctgcctcccg

SEQ ID NO: 1188 - RNA, 22 nt, synthetic construct
  source 1..22: mol_type = other RNA
gggattcttttgcctaggctta

SEQ ID NO: 1189 - RNA, 22 nt, synthetic construct
  source 1..22: mol_type = other RNA
gggcaacgcccagggaccaagt

SEQ ID NO: 1190 - RNA, 22 nt, synthetic construct
  source 1..22: mol_type = other RNA
gggcctggaagaagccctccct

SEQ ID NO: 1191 - RNA, 22 nt, synthetic construct
  source 1..22: mol_type = other RNA
gggcgggattcttttgcctagg

SEQ ID NO: 1192 - RNA, 22 nt, synthetic construct
  source 1..22: mol_type = other RNA
gggcggtccttacaagacggga

SEQ ID NO: 1193 - RNA, 22 nt, synthetic construct
  source 1..22: mol_type = other RNA
gggcgttgccctgcaggggagt

SEQ ID NO: 1194 - RNA, 22 nt, synthetic construct
  source 1..22: mol_type = other RNA
gggctaacttggtccctgggcg

SEQ ID NO: 1195 - RNA, 22 nt, synthetic construct
  source 1..22: mol_type = other RNA
gggcttcttccaggcccagggc

SEQ ID NO: 1196 - RNA, 22 nt, synthetic construct
  source 1..22: mol_type = other RNA
ggggaggggagtgccgcaatac

SEQ ID NO: 1197 - RNA, 22 nt, synthetic construct
  source 1..22: mol_type = other RNA
ggggagtgagcagctgtaagat

SEQ ID NO: 1198 - RNA, 22 nt, synthetic construct
  source 1..22: mol_type = other RNA
ggggagtgccgcaataccttta

SEQ ID NO: 1199 - RNA, 22 nt, synthetic construct
  source 1..22: mol_type = other RNA
ggggctaacttggtccctgggc

SEQ ID NO: 1200 - RNA, 22 nt, synthetic construct
  source 1..22: mol_type = other RNA
ggtccctgggcgttgccctgca

SEQ ID NO: 1201 - RNA, 22 nt, synthetic construct
  source 1..22: mol_type = other RNA
ggtccttacaagacgggaggca

SEQ ID NO: 1202 - RNA, 22 nt, synthetic construct
  source 1..22: mol_type = other RNA
gtaaggaccgccctgggcctgg

SEQ ID NO: 1203 - RNA, 22 nt, synthetic construct
  source 1..22: mol_type = other RNA
gtcatcgcctccatgtcgagtc

SEQ ID NO: 1204 - RNA, 22 nt, synthetic construct
  source 1..22: mol_type = other RNA
gtccctgggcgttgccctgcag

SEQ ID NO: 1205 - RNA, 22 nt, synthetic construct
  source 1..22: mol_type = other RNA
gtccttacaagacgggaggcag

SEQ ID NO: 1206 - RNA, 22 nt, synthetic construct
  source 1..22: mol_type = other RNA
gtcgagtcgcttctcgattatg

SEQ ID NO: 1207 - RNA, 22 nt, synthetic construct
  source 1..22: mol_type = other RNA
gtcgcccctcaaatcttacagc

SEQ ID NO: 1208 - RNA, 22 nt, synthetic construct
  source 1..22: mol_type = other RNA
gtcgcttctcgattatgggcgg

SEQ ID NO: 1209 - RNA, 22 nt, synthetic construct
  source 1..22: mol_type = other RNA
gtcttgtaaggaccgccctggg

SEQ ID NO: 1210 - RNA, 22 nt, synthetic construct
  source 1..22: mol_type = other RNA
gtgagcagctgtaagatttgag

SEQ ID NO: 1211 - RNA, 22 nt, synthetic construct
  source 1..22: mol_type = other RNA
gtgatctcgtcatcgcctccat

SEQ ID NO: 1212 - RNA, 22 nt, synthetic construct
  source 1..22: mol_type = other RNA
gtgccgcaatacctttatggga

SEQ ID NO: 1213 - RNA, 22 nt, synthetic construct
  source 1..22: mol_type = other RNA
gttagccccttaagcctaggca

SEQ ID NO: 1214 - RNA, 22 nt, synthetic construct
  source 1..22: mol_type = other RNA
gttctctgctgcctcccgtctt

SEQ ID NO: 1215 - RNA, 22 nt, synthetic construct
  source 1..22: mol_type = other RNA
gttgccctgcaggggagtgagc

SEQ ID NO: 1216 - RNA, 22 nt, synthetic construct
  source 1..22: mol_type = other RNA
taacttggtccctgggcgttgc

SEQ ID NO: 1217 - RNA, 22 nt, synthetic construct
  source 1..22: mol_type = other RNA
taagcctaggcaaaagaatccc

SEQ ID NO: 1218 - RNA, 22 nt, synthetic construct
  source 1..22: mol_type = other RNA
taaggaccgccctgggcctgga

SEQ ID NO: 1219 - RNA, 22 nt, synthetic construct
  source 1..22: mol_type = other RNA
taaggggctaacttggtccctg

SEQ ID NO: 1220 - RNA, 22 nt, synthetic construct
  source 1..22: mol_type = other RNA
taatcgagaagcgactcgacat

SEQ ID NO: 1221 - RNA, 22 nt, synthetic construct
  source 1..22: mol_type = other RNA
tacaagacgggaggcagcagag

SEQ ID NO: 1222 - RNA, 22 nt, synthetic construct
  source 1..22: mol_type = other RNA
tacagctgctcactcccctgca

SEQ ID NO: 1223 - RNA, 22 nt, synthetic construct
  source 1..22: mol_type = other RNA
tacctttatgggagttctctgc

SEQ ID NO: 1224 - RNA, 22 nt, synthetic construct
  source 1..22: mol_type = other RNA
tagccccttaagcctaggcaaa

SEQ ID NO: 1225 - RNA, 22 nt, synthetic construct
  source 1..22: mol_type = other RNA
taggcaaaagaatcccgcccat

SEQ ID NO: 1226 - RNA, 22 nt, synthetic construct
  source 1..22: mol_type = other RNA
taggcttaaggggctaacttgg

SEQ ID NO: 1227 - RNA, 22 nt, synthetic construct
  source 1..22: mol_type = other RNA
tatgggagttctctgctgcctc

SEQ ID NO: 1228 - RNA, 22 nt, synthetic construct
  source 1..22: mol_type = other RNA
tatgggcgggattcttttgcct

SEQ ID NO: 1229 - RNA, 22 nt, synthetic construct
  source 1..22: mol_type = other RNA
tcaaatcttacagctgctcact

SEQ ID NO: 1230 - RNA, 22 nt, synthetic construct
  source 1..22: mol_type = other RNA
tcacgcgaggaggaaaggaggg

SEQ ID NO: 1231 - RNA, 22 nt, synthetic construct
  source 1..22: mol_type = other RNA
tcactcccctgcagggcaacgc

SEQ ID NO: 1232 - RNA, 22 nt, synthetic construct
  source 1..22: mol_type = other RNA
tcatcgcctccatgtcgagtcg

SEQ ID NO: 1233 - RNA, 22 nt, synthetic construct
  source 1..22: mol_type = other RNA
tccaggcccagggcggtcctta

SEQ ID NO: 1234 - RNA, 22 nt, synthetic construct
  source 1..22: mol_type = other RNA
tccatgtcgagtcgcttctcga

SEQ ID NO: 1235 - RNA, 22 nt, synthetic construct
  source 1..22: mol_type = other RNA
tcccataaaggtattgcggcac

SEQ ID NO: 1236 - RNA, 22 nt, synthetic construct
  source 1..22: mol_type = other RNA
tcccctgcagggcaacgcccag

SEQ ID NO: 1237 - RNA, 22 nt, synthetic construct
  source 1..22: mol_type = other RNA
tcccgcccataatcgagaagcg

SEQ ID NO: 1238 - RNA, 22 nt, synthetic construct
  source 1..22: mol_type = other RNA
tcccgtcttgtaaggaccgccc

SEQ ID NO: 1239 - RNA, 22 nt, synthetic construct
  source 1..22: mol_type = other RNA
tccctcctttcctcctcgcgtg

SEQ ID NO: 1240 - RNA, 22 nt, synthetic construct
  source 1..22: mol_type = other RNA
tccctgggcgttgccctgcagg

SEQ ID NO: 1241 - RNA, 22 nt, synthetic construct
  source 1..22: mol_type = other RNA
tcctcctcgcgtgatctcgtca

SEQ ID NO: 1242 - RNA, 22 nt, synthetic construct
  source 1..22: mol_type = other RNA
tcctcgcgtgatctcgtcatcg

SEQ ID NO: 1243 - RNA, 22 nt, synthetic construct
  source 1..22: mol_type = other RNA
tccttacaagacgggaggcagc

SEQ ID NO: 1244 - RNA, 22 nt, synthetic construct
  source 1..22: mol_type = other RNA
tcctttcctcctcgcgtgatct

SEQ ID NO: 1245 - RNA, 22 nt, synthetic construct
  source 1..22: mol_type = other RNA
tcgacatggaggcgatgacgag

SEQ ID NO: 1246 - RNA, 22 nt, synthetic construct
  source 1..22: mol_type = other RNA
tcgagaagcgactcgacatgga

SEQ ID NO: 1247 - RNA, 22 nt, synthetic construct
  source 1..22: mol_type = other RNA
tcgagtcgcttctcgattatgg

SEQ ID NO: 1248 - RNA, 22 nt, synthetic construct
  source 1..22: mol_type = other RNA
tcgattatgggcgggattcttt

SEQ ID NO: 1249 - RNA, 22 nt, synthetic construct
  source 1..22: mol_type = other RNA
tcgcccctcaaatcttacagct

SEQ ID NO: 1250 - RNA, 22 nt, synthetic construct
  source 1..22: mol_type = other RNA
tcgcctccatgtcgagtcgctt

SEQ ID NO: 1251 - RNA, 22 nt, synthetic construct
  source 1..22: mol_type = other RNA
tcgcgtgatctcgtcatcgcct

SEQ ID NO: 1252 - RNA, 22 nt, synthetic construct
  source 1..22: mol_type = other RNA
tcgcttctcgattatgggcggg

SEQ ID NO: 1253 - RNA, 22 nt, synthetic construct
  source 1..22: mol_type = other RNA
tcgtcatcgcctccatgtcgag

SEQ ID NO: 1254 - RNA, 22 nt, synthetic construct
  source 1..22: mol_type = other RNA
tctcgattatgggcgggattct

SEQ ID NO: 1255 - RNA, 22 nt, synthetic construct
  source 1..22: mol_type = other RNA
tctcgtcatcgcctccatgtcg

SEQ ID NO: 1256 - RNA, 22 nt, synthetic construct
  source 1..22: mol_type = other RNA
tctctgctgcctcccgtcttgt

SEQ ID NO: 1257 - RNA, 22 nt, synthetic construct
  source 1..22: mol_type = other RNA
tctgctgcctcccgtcttgtaa

SEQ ID NO: 1258 - RNA, 22 nt, synthetic construct
  source 1..22: mol_type = other RNA
tcttacagctgctcactcccct

SEQ ID NO: 1259 - RNA, 22 nt, synthetic construct
  source 1..22: mol_type = other RNA
tcttccaggcccagggcggtcc

SEQ ID NO: 1260 - RNA, 22 nt, synthetic construct
  source 1..22: mol_type = other RNA
tcttgtaaggaccgccctgggc

SEQ ID NO: 1261 - RNA, 22 nt, synthetic construct
  source 1..22: mol_type = other RNA
tcttttgcctaggcttaagggg

SEQ ID NO: 1262 - RNA, 22 nt, synthetic construct
  source 1..22: mol_type = other RNA
tgacgagatcacgcgaggagga

SEQ ID NO: 1263 - RNA, 22 nt, synthetic construct
  source 1..22: mol_type = other RNA
tgagcagctgtaagatttgagg

SEQ ID NO: 1264 - RNA, 22 nt, synthetic construct
  source 1..22: mol_type = other RNA
tgatctcgtcatcgcctccatg

SEQ ID NO: 1265 - RNA, 22 nt, synthetic construct
  source 1..22: mol_type = other RNA
tgcagggcaacgcccagggacc

SEQ ID NO: 1266 - RNA, 22 nt, synthetic construct
  source 1..22: mol_type = other RNA
tgcaggggagtgagcagctgta

SEQ ID NO: 1267 - RNA, 22 nt, synthetic construct
  source 1..22: mol_type = other RNA
tgccctgcaggggagtgagcag

SEQ ID NO: 1268 - RNA, 22 nt, synthetic construct
  source 1..22: mol_type = other RNA
tgccgcaatacctttatgggag

SEQ ID NO: 1269 - RNA, 22 nt, synthetic construct
  source 1..22: mol_type = other RNA
tgcctaggcttaaggggctaac

SEQ ID NO: 1270 - RNA, 22 nt, synthetic construct
  source 1..22: mol_type = other RNA
tgcctcccgtcttgtaaggacc

SEQ ID NO: 1271 - RNA, 22 nt, synthetic construct
  source 1..22: mol_type = other RNA
tgctcactcccctgcagggcaa

SEQ ID NO: 1272 - RNA, 22 nt, synthetic construct
  source 1..22: mol_type = other RNA
tgctgcctcccgtcttgtaagg

SEQ ID NO: 1273 - RNA, 22 nt, synthetic construct
  source 1..22: mol_type = other RNA
tggaagaagccctccctccttt

SEQ ID NO: 1274 - RNA, 22 nt, synthetic construct
  source 1..22: mol_type = other RNA
tggaggcgatgacgagatcacg

SEQ ID NO: 1275 - RNA, 22 nt, synthetic construct
  source 1..22: mol_type = other RNA
tgggagttctctgctgcctccc

SEQ ID NO: 1276 - RNA, 22 nt, synthetic construct
  source 1..22: mol_type = other RNA
tgggcctggaagaagccctccc

SEQ ID NO: 1277 - RNA, 22 nt, synthetic construct
  source 1..22: mol_type = other RNA
tgggcgggattcttttgcctag

SEQ ID NO: 1278 - RNA, 22 nt, synthetic construct
  source 1..22: mol_type = other RNA
tgggcgttgccctgcaggggag

SEQ ID NO: 1279 - RNA, 22 nt, synthetic construct
  source 1..22: mol_type = other RNA
tggtccctgggcgttgccctgc

SEQ ID NO: 1280 - RNA, 22 nt, synthetic construct
  source 1..22: mol_type = other RNA
tgtaaggaccgccctgggcctg

SEQ ID NO: 1281 - RNA, 22 nt, synthetic construct
  source 1..22: mol_type = other RNA
tgtcgagtcgcttctcgattat

SEQ ID NO: 1282 - RNA, 22 nt, synthetic construct
  source 1..22: mol_type = other RNA
ttaagcctaggcaaaagaatcc

SEQ ID NO: 1283 - RNA, 22 nt, synthetic construct
  source 1..22: mol_type = other RNA
ttaaggggctaacttggtccct

SEQ ID NO: 1284 - RNA, 22 nt, synthetic construct
  source 1..22: mol_type = other RNA
ttacaagacgggaggcagcaga

SEQ ID NO: 1285 - RNA, 22 nt, synthetic construct
  source 1..22: mol_type = other RNA
ttacagctgctcactcccctgc

SEQ ID NO: 1286 - RNA, 22 nt, synthetic construct
  source 1..22: mol_type = other RNA
ttagccccttaagcctaggcaa

SEQ ID NO: 1287 - RNA, 22 nt, synthetic construct
  source 1..22: mol_type = other RNA
ttatgggagttctctgctgcct

SEQ ID NO: 1288 - RNA, 22 nt, synthetic construct
  source 1..22: mol_type = other RNA
ttatgggcgggattcttttgcc

SEQ ID NO: 1289 - RNA, 22 nt, synthetic construct
  source 1..22: mol_type = other RNA
ttccaggcccagggcggtcctt

SEQ ID NO: 1290 - RNA, 22 nt, synthetic construct
  source 1..22: mol_type = other RNA
ttcctcctcgcgtgatctcgtc

SEQ ID NO: 1291 - RNA, 22 nt, synthetic construct
  source 1..22: mol_type = other RNA
ttctcgattatgggcgggattc

SEQ ID NO: 1292 - RNA, 22 nt, synthetic construct
  source 1..22: mol_type = other RNA
ttctctgctgcctcccgtcttg

SEQ ID NO: 1293 - RNA, 22 nt, synthetic construct
  source 1..22: mol_type = other RNA
ttcttccaggcccagggcggtc

SEQ ID NO: 1294 - RNA, 22 nt, synthetic construct
  source 1..22: mol_type = other RNA
ttcttttgcctaggcttaaggg

SEQ ID NO: 1295 - RNA, 22 nt, synthetic construct
  source 1..22: mol_type = other RNA
ttgccctgcaggggagtgagca

SEQ ID NO: 1296 - RNA, 22 nt, synthetic construct
  source 1..22: mol_type = other RNA
ttgcctaggcttaaggggctaa

SEQ ID NO: 1297 - RNA, 22 nt, synthetic construct
  source 1..22: mol_type = other RNA
ttggtccctgggcgttgccctg

SEQ ID NO: 1298 - RNA, 22 nt, synthetic construct
  source 1..22: mol_type = other RNA
ttgtaaggaccgccctgggcct

SEQ ID NO: 1299 - RNA, 22 nt, synthetic construct
  source 1..22: mol_type = other RNA
tttatgggagttctctgctgcc

SEQ ID NO: 1300 - RNA, 22 nt, synthetic construct
  source 1..22: mol_type = other RNA
tttcctcctcgcgtgatctcgt

SEQ ID NO: 1301 - RNA, 22 nt, synthetic construct
  source 1..22: mol_type = other RNA
tttgcctaggcttaaggggcta

SEQ ID NO: 1302 - RNA, 22 nt, synthetic construct
  source 1..22: mol_type = other RNA
ttttgcctaggcttaaggggct

SEQ ID NO: 1303 - RNA, 20 nt, synthetic construct
  source 1..20: mol_type = other RNA
aaaaaagtatgcctgtgtat

SEQ ID NO: 1304 - RNA, 20 nt, synthetic construct
  source 1..20: mol_type = other RNA
aaaaacatgaaagggggagt

SEQ ID NO: 1305 - RNA, 20 nt, synthetic construct
  source 1..20: mol_type = other RNA
aaaaagtatgcctgtgtatt

SEQ ID NO: 1306 - RNA, 20 nt, synthetic construct
  source 1..20: mol_type = other RNA
aaaacacaaatggcgtattc

SEQ ID NO: 1307 - RNA, 20 nt, synthetic construct
  source 1..20: mol_type = other RNA
aaaacatgaaagggggagtt

SEQ ID NO: 1308 - RNA, 20 nt, synthetic construct
  source 1..20: mol_type = other RNA
aaaacgacacaatctggctc

SEQ ID NO: 1309 - RNA, 20 nt, synthetic construct
  source 1..20: mol_type = other RNA
aaaacgagagggaaggcgtc

SEQ ID NO: 1310 - RNA, 20 nt, synthetic construct
  source 1..20: mol_type = other RNA
aaaagagaccgaacctcacg

SEQ ID NO: 1311 - RNA, 20 nt, synthetic construct
  source 1..20: mol_type = other RNA
aaaagtatgcctgtgtattt

SEQ ID NO: 1312 - RNA, 20 nt, synthetic construct
  source 1..20: mol_type = other RNA
aaaatattccctttatgaat

SEQ ID NO: 1313 - RNA, 20 nt, synthetic construct
  source 1..20: mol_type = other RNA
aaaatgctcgaaaccggacg

SEQ ID NO: 1314 - RNA, 20 nt, synthetic construct
  source 1..20: mol_type = other RNA
aaaatggggtgttgcaacgg

SEQ ID NO: 1315 - RNA, 20 nt, synthetic construct
  source 1..20: mol_type = other RNA
aaacacaaatggcgtattct

SEQ ID NO: 1316 - RNA, 20 nt, synthetic construct
  source 1..20: mol_type = other RNA
aaacatgaaagggggagttg

SEQ ID NO: 1317 - RNA, 20 nt, synthetic construct
  source 1..20: mol_type = other RNA
aaacattatgttcccgactt

SEQ ID NO: 1318 - RNA, 20 nt, synthetic construct
  source 1..20: mol_type = other RNA
aaaccactgcgcggggcgcg

SEQ ID NO: 1319 - RNA, 20 nt, synthetic construct
  source 1..20: mol_type = other RNA
aaaccagccggaccgacccc

SEQ ID NO: 1320 - RNA, 20 nt, synthetic construct
  source 1..20: mol_type = other RNA
aaaccgactcccccgaagga

SEQ ID NO: 1321 - RNA, 20 nt, synthetic construct
  source 1..20: mol_type = other RNA
aaaccggacggagccattgc

SEQ ID NO: 1322 - RNA, 20 nt, synthetic construct
  source 1..20: mol_type = other RNA
aaacgacacaatctggctca

SEQ ID NO: 1323 - RNA, 20 nt, synthetic construct
  source 1..20: mol_type = other RNA
aaacgagagggaaggcgtcc

SEQ ID NO: 1324 - RNA, 20 nt, synthetic construct
  source 1..20: mol_type = other RNA
aaacgccactgaccgcacgg

SEQ ID NO: 1325 - RNA, 20 nt, synthetic construct
  source 1..20: mol_type = other RNA
aaacgccgtggcgccgcgtt

SEQ ID NO: 1326 - RNA, 20 nt, synthetic construct
  source 1..20: mol_type = other RNA
aaacggccaatcggcgacaa

SEQ ID NO: 1327 - RNA, 20 nt, synthetic construct
  source 1..20: mol_type = other RNA
aaacgtggagtaggcagttc

SEQ ID NO: 1328 - RNA, 20 nt, synthetic construct
  source 1..20: mol_type = other RNA
aaactgttgggaaagcccct

SEQ ID NO: 1329 - RNA, 20 nt, synthetic construct
  source 1..20: mol_type = other RNA
aaagaccactgacgcccaag

SEQ ID NO: 1330 - RNA, 20 nt, synthetic construct
  source 1..20: mol_type = other RNA
aaagagaccgaacctcacga

SEQ ID NO: 1331 - RNA, 20 nt, synthetic construct
  source 1..20: mol_type = other RNA
aaagagccctggttcaagta

SEQ ID NO: 1332 - RNA, 20 nt, synthetic construct
  source 1..20: mol_type = other RNA
aaagaggggggccggcacta

SEQ ID NO: 1333 - RNA, 20 nt, synthetic construct
  source 1..20: mol_type = other RNA
aaagccccttctatgctaat

SEQ ID NO: 1334 - RNA, 20 nt, synthetic construct
  source 1..20: mol_type = other RNA
aaagctcctgtcagttacgc

SEQ ID NO: 1335 - RNA, 20 nt, synthetic construct
  source 1..20: mol_type = other RNA
aaaggcaacccccgcaagcc

SEQ ID NO: 1336 - RNA, 20 nt, synthetic construct
  source 1..20: mol_type = other RNA
aaaggcagaaaaatattccc

SEQ ID NO: 1337 - RNA, 20 nt, synthetic construct
  source 1..20: mol_type = other RNA
aaaggcattaccttcgccac

SEQ ID NO: 1338 - RNA, 20 nt, synthetic construct
  source 1..20: mol_type = other RNA
aaaggcggagcgagccaaag

SEQ ID NO: 1339 - RNA, 20 nt, synthetic construct
  source 1..20: mol_type = other RNA
aaagggaatatttttctgcc

SEQ ID NO: 1340 - RNA, 20 nt, synthetic construct
  source 1..20: mol_type = other RNA
aaagggggagttgggtcgcc

SEQ ID NO: 1341 - RNA, 20 nt, synthetic construct
  source 1..20: mol_type = other RNA
aaagggggtgaagaggcgtt

SEQ ID NO: 1342 - RNA, 20 nt, synthetic construct
  source 1..20: mol_type = other RNA
aaaggggtggctggatgcag

SEQ ID NO: 1343 - RNA, 20 nt, synthetic construct
  source 1..20: mol_type = other RNA
aaaggtaaacgtggagtagg

SEQ ID NO: 1344 - RNA, 20 nt, synthetic construct
  source 1..20: mol_type = other RNA
aaagtatgcctgtgtatttc

SEQ ID NO: 1345 - RNA, 20 nt, synthetic construct
  source 1..20: mol_type = other RNA
aaagttaaactgttgggaaa

SEQ ID NO: 1346 - RNA, 20 nt, synthetic construct
  source 1..20: mol_type = other RNA
aaatattccctttatgaatt

SEQ ID NO: 1347 - RNA, 20 nt, synthetic construct
  source 1..20: mol_type = other RNA
aaatcgcatgagagggaaag

SEQ ID NO: 1348 - RNA, 20 nt, synthetic construct
  source 1..20: mol_type = other RNA
aaatcggctctggcgcgggc

SEQ ID NO: 1349 - RNA, 20 nt, synthetic construct
  source 1..20: mol_type = other RNA
aaatgctcgaaaccggacgg

SEQ ID NO: 1350 - RNA, 20 nt, synthetic construct
  source 1..20: mol_type = other RNA
aaatggcgtattctggttgg

SEQ ID NO: 1351 - RNA, 20 nt, synthetic construct
  source 1..20: mol_type = other RNA
aaatggggtgttgcaacggt

SEQ ID NO: 1352 - RNA, 20 nt, synthetic construct
  source 1..20: mol_type = other RNA
aacaaacattatgttcccga

SEQ ID NO: 1353 - RNA, 20 nt, synthetic construct
  source 1..20: mol_type = other RNA
aacacaaatggcgtattctg

SEQ ID NO: 1354 - RNA, 20 nt, synthetic construct
  source 1..20: mol_type = other RNA
aacacagtagtgccggcccc

SEQ ID NO: 1355 - RNA, 20 nt, synthetic construct
  source 1..20: mol_type = other RNA
aacaccccattttcccaggg

SEQ ID NO: 1356 - RNA, 20 nt, synthetic construct
  source 1..20: mol_type = other RNA
aacagtttaactttccctct

SEQ ID NO: 1357 - RNA, 20 nt, synthetic construct
  source 1..20: mol_type = other RNA
aacataatgtttgttacgtt

SEQ ID NO: 1358 - RNA, 20 nt, synthetic construct
  source 1..20: mol_type = other RNA
aacatgaaagggggagttgg

SEQ ID NO: 1359 - RNA, 20 nt, synthetic construct
  source 1..20: mol_type = other RNA
aacattatgttcccgacttc

SEQ ID NO: 1360 - RNA, 20 nt, synthetic construct
  source 1..20: mol_type = other RNA
aaccagaatacgccatttgt

SEQ ID NO: 1361 - RNA, 20 nt, synthetic construct
  source 1..20: mol_type = other RNA
aaccagccggaccgaccccc

SEQ ID NO: 1362 - RNA, 20 nt, synthetic construct
  source 1..20: mol_type = other RNA
aaccagggctctttcctaca

SEQ ID NO: 1363 - RNA, 20 nt, synthetic construct
  source 1..20: mol_type = other RNA
aacccccgcaagccaccaga

SEQ ID NO: 1364 - RNA, 20 nt, synthetic construct
  source 1..20: mol_type = other RNA
aaccctacacattcaacgag

SEQ ID NO: 1365 - RNA, 20 nt, synthetic construct
  source 1..20: mol_type = other RNA
aaccgactcccccgaaggaa

SEQ ID NO: 1366 - RNA, 20 nt, synthetic construct
  source 1..20: mol_type = other RNA
aaccggacggagccattgct

SEQ ID NO: 1367 - RNA, 20 nt, synthetic construct
  source 1..20: mol_type = other RNA
aaccggagggggagggagaa

SEQ ID NO: 1368 - RNA, 20 nt, synthetic construct
  source 1..20: mol_type = other RNA
aacctcacgatcgggcccca

SEQ ID NO: 1369 - RNA, 20 nt, synthetic construct
  source 1..20: mol_type = other RNA
aacgacacaatctggctcaa

SEQ ID NO: 1370 - RNA, 20 nt, synthetic construct
  source 1..20: mol_type = other RNA
aacgagagggaaggcgtcca

SEQ ID NO: 1371 - RNA, 20 nt, synthetic construct
  source 1..20: mol_type = other RNA
aacgaggctatctcagacac

SEQ ID NO: 1372 - RNA, 20 nt, synthetic construct
  source 1..20: mol_type = other RNA
aacgatcttgtgagaatatc

SEQ ID NO: 1373 - RNA, 20 nt, synthetic construct
  source 1..20: mol_type = other RNA
aacgccactgaccgcacggg

SEQ ID NO: 1374 - RNA, 20 nt, synthetic construct
  source 1..20: mol_type = other RNA
aacgccgtggcgccgcgttg

SEQ ID NO: 1375 - RNA, 20 nt, synthetic construct
  source 1..20: mol_type = other RNA
aacgcctcttcacccccttt

SEQ ID NO: 1376 - RNA, 20 nt, synthetic construct
  source 1..20: mol_type = other RNA
aacgcgagagtcgctaagcg

SEQ ID NO: 1377 - RNA, 20 nt, synthetic construct
  source 1..20: mol_type = other RNA
aacgcggcgccacggcgttt

SEQ ID NO: 1378 - RNA, 20 nt, synthetic construct
  source 1..20: mol_type = other RNA
aacggccaatcggcgacaag

SEQ ID NO: 1379 - RNA, 20 nt, synthetic construct
  source 1..20: mol_type = other RNA
aacgggggtagggagtgggg

SEQ ID NO: 1380 - RNA, 20 nt, synthetic construct
  source 1..20: mol_type = other RNA
aacggtgtgtgcaaggcggc

SEQ ID NO: 1381 - RNA, 20 nt, synthetic construct
  source 1..20: mol_type = other RNA
aacgtaacaaacattatgtt

SEQ ID NO: 1382 - RNA, 20 nt, synthetic construct
  source 1..20: mol_type = other RNA
aacgtggagtaggcagttcc

SEQ ID NO: 1383 - RNA, 20 nt, synthetic construct
  source 1..20: mol_type = other RNA
aacgtggcaggaagcgcgcg

SEQ ID NO: 1384 - RNA, 20 nt, synthetic construct
  source 1..20: mol_type = other RNA
aacgtgtggtgggggtggcg

SEQ ID NO: 1385 - RNA, 20 nt, synthetic construct
  source 1..20: mol_type = other RNA
aactccaggctcgaacccta

SEQ ID NO: 1386 - RNA, 20 nt, synthetic construct
  source 1..20: mol_type = other RNA
aactccccctttcatgtttt

SEQ ID NO: 1387 - RNA, 20 nt, synthetic construct
  source 1..20: mol_type = other RNA
aactcgagtcctgccgcctc

SEQ ID NO: 1388 - RNA, 20 nt, synthetic construct
  source 1..20: mol_type = other RNA
aactctgatcgctctggggg

SEQ ID NO: 1389 - RNA, 20 nt, synthetic construct
  source 1..20: mol_type = other RNA
aactctggtgggaggggagg

SEQ ID NO: 1390 - RNA, 20 nt, synthetic construct
  source 1..20: mol_type = other RNA
aactgacaggagctttactc

SEQ ID NO: 1391 - RNA, 20 nt, synthetic construct
  source 1..20: mol_type = other RNA
aactgcctactccacgttta

SEQ ID NO: 1392 - RNA, 20 nt, synthetic construct
  source 1..20: mol_type = other RNA
aactgttgggaaagcccctt

SEQ ID NO: 1393 - RNA, 20 nt, synthetic construct
  source 1..20: mol_type = other RNA
aactttccctctcatgcgat

SEQ ID NO: 1394 - RNA, 20 nt, synthetic construct
  source 1..20: mol_type = other RNA
aagaagtgagacaagcaagg

SEQ ID NO: 1395 - RNA, 20 nt, synthetic construct
  source 1..20: mol_type = other RNA
aagacaagcaggcggcgggt

SEQ ID NO: 1396 - RNA, 20 nt, synthetic construct
  source 1..20: mol_type = other RNA
aagaccactgacgcccaaga

SEQ ID NO: 1397 - RNA, 20 nt, synthetic construct
  source 1..20: mol_type = other RNA
aagagaaagaccactgacgc

SEQ ID NO: 1398 - RNA, 20 nt, synthetic construct
  source 1..20: mol_type = other RNA
aagagaattcataaagggaa

SEQ ID NO: 1399 - RNA, 20 nt, synthetic construct
  source 1..20: mol_type = other RNA
aagagaccgaacctcacgat

SEQ ID NO: 1400 - RNA, 20 nt, synthetic construct
  source 1..20: mol_type = other RNA
aagagccctggttcaagtag

SEQ ID NO: 1401 - RNA, 20 nt, synthetic construct
  source 1..20: mol_type = other RNA
aagagcttggggagggccag

SEQ ID NO: 1402 - RNA, 20 nt, synthetic construct
  source 1..20: mol_type = other RNA
aagaggagtgtaggaaagag

SEQ ID NO: 1403 - RNA, 20 nt, synthetic construct
  source 1..20: mol_type = other RNA
aagaggcctctcctcaaggg

SEQ ID NO: 1404 - RNA, 20 nt, synthetic construct
  source 1..20: mol_type = other RNA
aagaggcgttgggggagggg

SEQ ID NO: 1405 - RNA, 20 nt, synthetic construct
  source 1..20: mol_type = other RNA
aagaggctagccggaagcgc

SEQ ID NO: 1406 - RNA, 20 nt, synthetic construct
  source 1..20: mol_type = other RNA
aagaggctgtgcttcggcgc

SEQ ID NO: 1407 - RNA, 20 nt, synthetic construct
  source 1..20: mol_type = other RNA
aagaggggggccggcactac

SEQ ID NO: 1408 - RNA, 20 nt, synthetic construct
  source 1..20: mol_type = other RNA
aagatattctcacaagatcg

SEQ ID NO: 1409 - RNA, 20 nt, synthetic construct
  source 1..20: mol_type = other RNA
aagatcgttctccacgccca

SEQ ID NO: 1410 - RNA, 20 nt, synthetic construct
  source 1..20: mol_type = other RNA
aagattacggaggggagatc

SEQ ID NO: 1411 - RNA, 20 nt, synthetic construct
  source 1..20: mol_type = other RNA
aagcaaggactctatagaat

SEQ ID NO: 1412 - RNA, 20 nt, synthetic construct
  source 1..20: mol_type = other RNA
aagcacagcctcttctctag

SEQ ID NO: 1413 - RNA, 20 nt, synthetic construct
  source 1..20: mol_type = other RNA
aagcagccatctgaggtggg

SEQ ID NO: 1414 - RNA, 20 nt, synthetic construct
  source 1..20: mol_type = other RNA
aagcaggcggcgggtaaacc

SEQ ID NO: 1415 - RNA, 20 nt, synthetic construct
  source 1..20: mol_type = other RNA
aagccaccagacggcccccc

SEQ ID NO: 1416 - RNA, 20 nt, synthetic construct
  source 1..20: mol_type = other RNA
aagccagaaaacgagaggga

SEQ ID NO: 1417 - RNA, 20 nt, synthetic construct
  source 1..20: mol_type = other RNA
aagccccttctatgctaatt

SEQ ID NO: 1418 - RNA, 20 nt, synthetic construct
  source 1..20: mol_type = other RNA
aagcccgacctgctacaggc

SEQ ID NO: 1419 - RNA, 20 nt, synthetic construct
  source 1..20: mol_type = other RNA
aagccgccggggccgcctag

SEQ ID NO: 1420 - RNA, 20 nt, synthetic construct
  source 1..20: mol_type = other RNA
aagcgctcctccctctgcga

SEQ ID NO: 1421 - RNA, 20 nt, synthetic construct
  source 1..20: mol_type = other RNA
aagcggctgcgtactcccga

SEQ ID NO: 1422 - RNA, 20 nt, synthetic construct
  source 1..20: mol_type = other RNA
aagcgtcctgacccaggaaa

SEQ ID NO: 1423 - RNA, 20 nt, synthetic construct
  source 1..20: mol_type = other RNA
aagctcctgtcagttacgcc

SEQ ID NO: 1424 - RNA, 20 nt, synthetic construct
  source 1..20: mol_type = other RNA
aagctcttaggaggatgctg

SEQ ID NO: 1425 - RNA, 20 nt, synthetic construct
  source 1..20: mol_type = other RNA
aagctgtgggaccgggccct

SEQ ID NO: 1426 - RNA, 20 nt, synthetic construct
  source 1..20: mol_type = other RNA
aaggaaggggagggtgggag

SEQ ID NO: 1427 - RNA, 20 nt, synthetic construct
  source 1..20: mol_type = other RNA
aaggactctatagaatcaat

SEQ ID NO: 1428 - RNA, 20 nt, synthetic construct
  source 1..20: mol_type = other RNA
aaggagagcgagcgcgggga

SEQ ID NO: 1429 - RNA, 20 nt, synthetic construct
  source 1..20: mol_type = other RNA
aaggcaacccccgcaagcca

SEQ ID NO: 1430 - RNA, 20 nt, synthetic construct
  source 1..20: mol_type = other RNA
aaggcaagtaaaacgacaca

SEQ ID NO: 1431 - RNA, 20 nt, synthetic construct
  source 1..20: mol_type = other RNA
aaggcagaaaaatattccct

SEQ ID NO: 1432 - RNA, 20 nt, synthetic construct
  source 1..20: mol_type = other RNA
aaggcattaccttcgccacc

SEQ ID NO: 1433 - RNA, 20 nt, synthetic construct
  source 1..20: mol_type = other RNA
aaggccgcgagaacgggggt

SEQ ID NO: 1434 - RNA, 20 nt, synthetic construct
  source 1..20: mol_type = other RNA
aaggcggagcgagccaaagg

SEQ ID NO: 1435 - RNA, 20 nt, synthetic construct
  source 1..20: mol_type = other RNA
aaggcggcgaggggggtgag

SEQ ID NO: 1436 - RNA, 20 nt, synthetic construct
  source 1..20: mol_type = other RNA
aaggcgtccaggaagattac

SEQ ID NO: 1437 - RNA, 20 nt, synthetic construct
  source 1..20: mol_type = other RNA
aagggaaaggtaaacgtgga

SEQ ID NO: 1438 - RNA, 20 nt, synthetic construct
  source 1..20: mol_type = other RNA
aagggaatatttttctgcct

SEQ ID NO: 1439 - RNA, 20 nt, synthetic construct
  source 1..20: mol_type = other RNA
aagggagcggaaaatgctcg

SEQ ID NO: 1440 - RNA, 20 nt, synthetic construct
  source 1..20: mol_type = other RNA
aagggcccggtcccacagct

SEQ ID NO: 1441 - RNA, 20 nt, synthetic construct
  source 1..20: mol_type = other RNA
aagggcgagacaagcccgac

SEQ ID NO: 1442 - RNA, 20 nt, synthetic construct
  source 1..20: mol_type = other RNA
aaggggagggtgggaggacg

SEQ ID NO: 1443 - RNA, 20 nt, synthetic construct
  source 1..20: mol_type = other RNA
aaggggctttcccaacagtt

SEQ ID NO: 1444 - RNA, 20 nt, synthetic construct
  source 1..20: mol_type = other RNA
aagggggagttgggtcgcct

SEQ ID NO: 1445 - RNA, 20 nt, synthetic construct
  source 1..20: mol_type = other RNA
aagggggtgaagaggcgttg

SEQ ID NO: 1446 - RNA, 20 nt, synthetic construct
  source 1..20: mol_type = other RNA
aaggggtggctggatgcagg

SEQ ID NO: 1447 - RNA, 20 nt, synthetic construct
  source 1..20: mol_type = other RNA
aagggtcacctcctccgtct

SEQ ID NO: 1448 - RNA, 20 nt, synthetic construct
  source 1..20: mol_type = other RNA
aagggtccgacagaaaagag

SEQ ID NO: 1449 - RNA, 20 nt, synthetic construct
  source 1..20: mol_type = other RNA
aaggtaaacgtggagtaggc

SEQ ID NO: 1450 - RNA, 20 nt, synthetic construct
  source 1..20: mol_type = other RNA
aaggtaagggtccgacagaa

SEQ ID NO: 1451 - RNA, 20 nt, synthetic construct
  source 1..20: mol_type = other RNA
aaggtaatgcctttgggaag

SEQ ID NO: 1452 - RNA, 20 nt, synthetic construct
  source 1..20: mol_type = other RNA
aagtaaaacgacacaatctg

SEQ ID NO: 1453 - RNA, 20 nt, synthetic construct
  source 1..20: mol_type = other RNA
aagtaggtaaatcgcatgag

SEQ ID NO: 1454 - RNA, 20 nt, synthetic construct
  source 1..20: mol_type = other RNA
aagtatgcctgtgtatttcg

SEQ ID NO: 1455 - RNA, 20 nt, synthetic construct
  source 1..20: mol_type = other RNA
aagtcgggaacataatgttt

SEQ ID NO: 1456 - RNA, 20 nt, synthetic construct
  source 1..20: mol_type = other RNA
aagtcgggaatgtgaagagg

SEQ ID NO: 1457 - RNA, 20 nt, synthetic construct
  source 1..20: mol_type = other RNA
aagtgagacaagcaaggact

SEQ ID NO: 1458 - RNA, 20 nt, synthetic construct
  source 1..20: mol_type = other RNA
aagtggcagcatcctcctaa

SEQ ID NO: 1459 - RNA, 20 nt, synthetic construct
  source 1..20: mol_type = other RNA
aagttaaactgttgggaaag

SEQ ID NO: 1460 - RNA, 20 nt, synthetic construct
  source 1..20: mol_type = other RNA
aatacgccatttgtgttttc

SEQ ID NO: 1461 - RNA, 20 nt, synthetic construct
  source 1..20: mol_type = other RNA
aatatcttcaaaggcagaaa

SEQ ID NO: 1462 - RNA, 20 nt, synthetic construct
  source 1..20: mol_type = other RNA
aatattccctttatgaattc

SEQ ID NO: 1463 - RNA, 20 nt, synthetic construct
  source 1..20: mol_type = other RNA
aatatttttctgcctttgaa

SEQ ID NO: 1464 - RNA, 20 nt, synthetic construct
  source 1..20: mol_type = other RNA
aatcaattagcatagaaggg

SEQ ID NO: 1465 - RNA, 20 nt, synthetic construct
  source 1..20: mol_type = other RNA
aatcagcggaagccgccggg

SEQ ID NO: 1466 - RNA, 20 nt, synthetic construct
  source 1..20: mol_type = other RNA
aatcaggtgtcgaagacaag

SEQ ID NO: 1467 - RNA, 20 nt, synthetic construct
  source 1..20: mol_type = other RNA
aatccccgtgcggtcagtgg

SEQ ID NO: 1468 - RNA, 20 nt, synthetic construct
  source 1..20: mol_type = other RNA
aatcgcatgagagggaaagt

SEQ ID NO: 1469 - RNA, 20 nt, synthetic construct
  source 1..20: mol_type = other RNA
aatcggcgacaagaggctag

SEQ ID NO: 1470 - RNA, 20 nt, synthetic construct
  source 1..20: mol_type = other RNA
aatcggctctggcgcgggcg

SEQ ID NO: 1471 - RNA, 20 nt, synthetic construct
  source 1..20: mol_type = other RNA
aatctaggcgacccaactcc

SEQ ID NO: 1472 - RNA, 20 nt, synthetic construct
  source 1..20: mol_type = other RNA
aatctggctcaactccaggc

SEQ ID NO: 1473 - RNA, 20 nt, synthetic construct
  source 1..20: mol_type = other RNA
aatcttcctggacgccttcc

SEQ ID NO: 1474 - RNA, 20 nt, synthetic construct
  source 1..20: mol_type = other RNA
aatgcctttgggaagcagcc

SEQ ID NO: 1475 - RNA, 20 nt, synthetic construct
  source 1..20: mol_type = other RNA
aatgctcgaaaccggacgga

SEQ ID NO: 1476 - RNA, 20 nt, synthetic construct
  source 1..20: mol_type = other RNA
aatggcccgtacccgtgagg

SEQ ID NO: 1477 - RNA, 20 nt, synthetic construct
  source 1..20: mol_type = other RNA
aatggcgcggcgggaggggg

SEQ ID NO: 1478 - RNA, 20 nt, synthetic construct
  source 1..20: mol_type = other RNA
aatggcgtattctggttgga

SEQ ID NO: 1479 - RNA, 20 nt, synthetic construct
  source 1..20: mol_type = other RNA
aatggctccgtccggtttcg

SEQ ID NO: 1480 - RNA, 20 nt, synthetic construct
  source 1..20: mol_type = other RNA
aatggggtgttgcaacggtg

SEQ ID NO: 1481 - RNA, 20 nt, synthetic construct
  source 1..20: mol_type = other RNA
aatgggtgcggggcggtggg

SEQ ID NO: 1482 - RNA, 20 nt, synthetic construct
  source 1..20: mol_type = other RNA
aatgtgaagaggagtgtagg

SEQ ID NO: 1483 - RNA, 20 nt, synthetic construct
  source 1..20: mol_type = other RNA
aatgtgtagggttcgagcct

SEQ ID NO: 1484 - RNA, 20 nt, synthetic construct
  source 1..20: mol_type = other RNA
aatgtttgttacgttgggag

SEQ ID NO: 1485 - RNA, 20 nt, synthetic construct
  source 1..20: mol_type = other RNA
aattagcatagaaggggctt

SEQ ID NO: 1486 - RNA, 20 nt, synthetic construct
  source 1..20: mol_type = other RNA
aattcataaagggaatattt

SEQ ID NO: 1487 - RNA, 20 nt, synthetic construct
  source 1..20: mol_type = other RNA
aattctctttccctctgcgt

SEQ ID NO: 1488 - RNA, 20 nt, synthetic construct
  source 1..20: mol_type = other RNA
aattgattctatagagtcct

SEQ ID NO: 1489 - RNA, 20 nt, synthetic construct
  source 1..20: mol_type = other RNA
acaaacattatgttcccgac

SEQ ID NO: 1490 - RNA, 20 nt, synthetic construct
  source 1..20: mol_type = other RNA
acaaatggcgtattctggtt

SEQ ID NO: 1491 - RNA, 20 nt, synthetic construct
  source 1..20: mol_type = other RNA
acaactctgatcgctctggg

SEQ ID NO: 1492 - RNA, 20 nt, synthetic construct
  source 1..20: mol_type = other RNA
acaagaggctagccggaagc

SEQ ID NO: 1493 - RNA, 20 nt, synthetic construct
  source 1..20: mol_type = other RNA
acaagatcgttctccacgcc

SEQ ID NO: 1494 - RNA, 20 nt, synthetic construct
  source 1..20: mol_type = other RNA
acaagcaaggactctataga

SEQ ID NO: 1495 - RNA, 20 nt, synthetic construct
  source 1..20: mol_type = other RNA
acaagcaggcggcgggtaaa

SEQ ID NO: 1496 - RNA, 20 nt, synthetic construct
  source 1..20: mol_type = other RNA
acaagcccgacctgctacag

SEQ ID NO: 1497 - RNA, 20 nt, synthetic construct
  source 1..20: mol_type = other RNA
acaaggccgcgagaacgggg

SEQ ID NO: 1498 - RNA, 20 nt, synthetic construct
  source 1..20: mol_type = other RNA
acaaggtaagggtccgacag

SEQ ID NO: 1499 - RNA, 20 nt, synthetic construct
  source 1..20: mol_type = other RNA
acaatctggctcaactccag

SEQ ID NO: 1500 - RNA, 20 nt, synthetic construct
  source 1..20: mol_type = other RNA
acacaaatggcgtattctgg

SEQ ID NO: 1501 - RNA, 20 nt, synthetic construct
  source 1..20: mol_type = other RNA
acacaatctggctcaactcc

SEQ ID NO: 1502 - RNA, 20 nt, synthetic construct
  source 1..20: mol_type = other RNA
acacaccgttgcaacacccc

SEQ ID NO: 1503 - RNA, 20 nt, synthetic construct
  source 1..20: mol_type = other RNA
acacacggcgggaggagaaa

SEQ ID NO: 1504 - RNA, 20 nt, synthetic construct
  source 1..20: mol_type = other RNA
acacagtagtgccggccccc

SEQ ID NO: 1505 - RNA, 20 nt, synthetic construct
  source 1..20: mol_type = other RNA
acacattcaacgaggctatc

SEQ ID NO: 1506 - RNA, 20 nt, synthetic construct
  source 1..20: mol_type = other RNA
acacccagcatctctacacc

SEQ ID NO: 1507 - RNA, 20 nt, synthetic construct
  source 1..20: mol_type = other RNA
acaccccacctacctacccg

SEQ ID NO: 1508 - RNA, 20 nt, synthetic construct
  source 1..20: mol_type = other RNA
acaccccattttcccaggga

SEQ ID NO: 1509 - RNA, 20 nt, synthetic construct
  source 1..20: mol_type = other RNA
acaccgttgcaacaccccat

SEQ ID NO: 1510 - RNA, 20 nt, synthetic construct
  source 1..20: mol_type = other RNA
acacctgattggctgtcgaa

SEQ ID NO: 1511 - RNA, 20 nt, synthetic construct
  source 1..20: mol_type = other RNA
acacgcagagggaaagagaa

SEQ ID NO: 1512 - RNA, 20 nt, synthetic construct
  source 1..20: mol_type = other RNA
acacgccacggggagccaga

SEQ ID NO: 1513 - RNA, 20 nt, synthetic construct
  source 1..20: mol_type = other RNA
acacgccccctcccgccgcg

SEQ ID NO: 1514 - RNA, 20 nt, synthetic construct
  source 1..20: mol_type = other RNA
acacgctgtggcacacgcca

SEQ ID NO: 1515 - RNA, 20 nt, synthetic construct
  source 1..20: mol_type = other RNA
acacggcgggaggagaaacg

SEQ ID NO: 1516 - RNA, 20 nt, synthetic construct
  source 1..20: mol_type = other RNA
acacgttctctggctccccg

SEQ ID NO: 1517 - RNA, 20 nt, synthetic construct
  source 1..20: mol_type = other RNA
acactcctcttcacattccc

SEQ ID NO: 1518 - RNA, 20 nt, synthetic construct
  source 1..20: mol_type = other RNA
acactgcggcgctcggcctc

SEQ ID NO: 1519 - RNA, 20 nt, synthetic construct
  source 1..20: mol_type = other RNA
acactggggggatgggtggc

SEQ ID NO: 1520 - RNA, 20 nt, synthetic construct
  source 1..20: mol_type = other RNA
acagaaaagagaccgaacct

SEQ ID NO: 1521 - RNA, 20 nt, synthetic construct
  source 1..20: mol_type = other RNA
acagacaactctgatcgctc

SEQ ID NO: 1522 - RNA, 20 nt, synthetic construct
  source 1..20: mol_type = other RNA
acagccaatcaggtgtcgaa

SEQ ID NO: 1523 - RNA, 20 nt, synthetic construct
  source 1..20: mol_type = other RNA
acagcctcttctctaggcgg

SEQ ID NO: 1524 - RNA, 20 nt, synthetic construct
  source 1..20: mol_type = other RNA
acagcgtgtctgagatagcc

SEQ ID NO: 1525 - RNA, 20 nt, synthetic construct
  source 1..20: mol_type = other RNA
acagcttcgacagccaatca

SEQ ID NO: 1526 - RNA, 20 nt, synthetic construct
  source 1..20: mol_type = other RNA
acaggagctttactccaacc

SEQ ID NO: 1527 - RNA, 20 nt, synthetic construct
  source 1..20: mol_type = other RNA
acaggcactcgtgggggtgg

SEQ ID NO: 1528 - RNA, 20 nt, synthetic construct
  source 1..20: mol_type = other RNA
acagtagtgccggcccccct

SEQ ID NO: 1529 - RNA, 20 nt, synthetic construct
  source 1..20: mol_type = other RNA
acagtttaactttccctctc

SEQ ID NO: 1530 - RNA, 20 nt, synthetic construct
  source 1..20: mol_type = other RNA
acataatgtttgttacgttg

SEQ ID NO: 1531 - RNA, 20 nt, synthetic construct
  source 1..20: mol_type = other RNA
acatgaaagggggagttggg

SEQ ID NO: 1532 - RNA, 20 nt, synthetic construct
  source 1..20: mol_type = other RNA
acatgagcgaaaccactgcg

SEQ ID NO: 1533 - RNA, 20 nt, synthetic construct
  source 1..20: mol_type = other RNA
acattatgttcccgacttcc

SEQ ID NO: 1534 - RNA, 20 nt, synthetic construct
  source 1..20: mol_type = other RNA
acattcaacgaggctatctc

SEQ ID NO: 1535 - RNA, 20 nt, synthetic construct
  source 1..20: mol_type = other RNA
acattcccgacttacacgca

SEQ ID NO: 1536 - RNA, 20 nt, synthetic construct
  source 1..20: mol_type = other RNA
accacacgttctctggctcc

SEQ ID NO: 1537 - RNA, 20 nt, synthetic construct
  source 1..20: mol_type = other RNA
accactgacgcccaagaagt

SEQ ID NO: 1538 - RNA, 20 nt, synthetic construct
  source 1..20: mol_type = other RNA
accagaatacgccatttgtg

SEQ ID NO: 1539 - RNA, 20 nt, synthetic construct
  source 1..20: mol_type = other RNA
accagacggcccccctagcc

SEQ ID NO: 1540 - RNA, 20 nt, synthetic construct
  source 1..20: mol_type = other RNA
accagagttccgctccccta

SEQ ID NO: 1541 - RNA, 20 nt, synthetic construct
  source 1..20: mol_type = other RNA
accagccggaccgacccccg

SEQ ID NO: 1542 - RNA, 20 nt, synthetic construct
  source 1..20: mol_type = other RNA
accagggctctttcctacac

SEQ ID NO: 1543 - RNA, 20 nt, synthetic construct
  source 1..20: mol_type = other RNA
acccaactccccctttcatg

SEQ ID NO: 1544 - RNA, 20 nt, synthetic construct
  source 1..20: mol_type = other RNA
acccaaggagagcgagcgcg

SEQ ID NO: 1545 - RNA, 20 nt, synthetic construct
  source 1..20: mol_type = other RNA
acccagcatctctacacccc

SEQ ID NO: 1546 - RNA, 20 nt, synthetic construct
  source 1..20: mol_type = other RNA
acccaggaaaaacatgaaag

SEQ ID NO: 1547 - RNA, 20 nt, synthetic construct
  source 1..20: mol_type = other RNA
acccagggggcaacgcgaga

SEQ ID NO: 1548 - RNA, 20 nt, synthetic construct
  source 1..20: mol_type = other RNA
acccatccccccagtgtacc

SEQ ID NO: 1549 - RNA, 20 nt, synthetic construct
  source 1..20: mol_type = other RNA
acccattggcccactcgccg

SEQ ID NO: 1550 - RNA, 20 nt, synthetic construct
  source 1..20: mol_type = other RNA
accccacctacctacccgcc

SEQ ID NO: 1551 - RNA, 20 nt, synthetic construct
  source 1..20: mol_type = other RNA
accccattttcccagggaga

SEQ ID NO: 1552 - RNA, 20 nt, synthetic construct
  source 1..20: mol_type = other RNA
acccccaccacacgttctct

SEQ ID NO: 1553 - RNA, 20 nt, synthetic construct
  source 1..20: mol_type = other RNA
acccccacctcacgggtacg

SEQ ID NO: 1554 - RNA, 20 nt, synthetic construct
  source 1..20: mol_type = other RNA
acccccacgagtgcctgtag

SEQ ID NO: 1555 - RNA, 20 nt, synthetic construct
  source 1..20: mol_type = other RNA
acccccctcgccgccttgca

SEQ ID NO: 1556 - RNA, 20 nt, synthetic construct
  source 1..20: mol_type = other RNA
acccccgcaagccaccagac

SEQ ID NO: 1557 - RNA, 20 nt, synthetic construct
  source 1..20: mol_type = other RNA
acccccgcgccccgcgcagt

SEQ ID NO: 1558 - RNA, 20 nt, synthetic construct
  source 1..20: mol_type = other RNA
acccccgctcctcccccacc

SEQ ID NO: 1559 - RNA, 20 nt, synthetic construct
  source 1..20: mol_type = other RNA
acccccgttctcgcggcctt

SEQ ID NO: 1560 - RNA, 20 nt, synthetic construct
  source 1..20: mol_type = other RNA
accccctttcctgggaactg

SEQ ID NO: 1561 - RNA, 20 nt, synthetic construct
  source 1..20: mol_type = other RNA
acccctttccctcccaacgt

SEQ ID NO: 1562 - RNA, 20 nt, synthetic construct
  source 1..20: mol_type = other RNA
acccgccccacccagggggc

SEQ ID NO: 1563 - RNA, 20 nt, synthetic construct
  source 1..20: mol_type = other RNA
acccgccgcctgcttgtctt

SEQ ID NO: 1564 - RNA, 20 nt, synthetic construct
  source 1..20: mol_type = other RNA
acccgtgaggtgggggtggg

SEQ ID NO: 1565 - RNA, 20 nt, synthetic construct
  source 1..20: mol_type = other RNA
accctacacattcaacgagg

SEQ ID NO: 1566 - RNA, 20 nt, synthetic construct
  source 1..20: mol_type = other RNA
accctccccttccttcgggg

SEQ ID NO: 1567 - RNA, 20 nt, synthetic construct
  source 1..20: mol_type = other RNA
acccttaccttgtcccaggc

SEQ ID NO: 1568 - RNA, 20 nt, synthetic construct
  source 1..20: mol_type = other RNA
acccttccctcccctggggc

SEQ ID NO: 1569 - RNA, 20 nt, synthetic construct
  source 1..20: mol_type = other RNA
accgaacctcacgatcgggc

SEQ ID NO: 1570 - RNA, 20 nt, synthetic construct
  source 1..20: mol_type = other RNA
accgacccccgctcctcccc

SEQ ID NO: 1571 - RNA, 20 nt, synthetic construct
  source 1..20: mol_type = other RNA
accgactcccccgaaggaag

SEQ ID NO: 1572 - RNA, 20 nt, synthetic construct
  source 1..20: mol_type = other RNA
accgcacctcccctcccacc

SEQ ID NO: 1573 - RNA, 20 nt, synthetic construct
  source 1..20: mol_type = other RNA
accgcacggggattcccagc

SEQ ID NO: 1574 - RNA, 20 nt, synthetic construct
  source 1..20: mol_type = other RNA
accgccccgcacccattggc

SEQ ID NO: 1575 - RNA, 20 nt, synthetic construct
  source 1..20: mol_type = other RNA
accgcctgaagggcgagaca

SEQ ID NO: 1576 - RNA, 20 nt, synthetic construct
  source 1..20: mol_type = other RNA
accggacggagccattgctc

SEQ ID NO: 1577 - RNA, 20 nt, synthetic construct
  source 1..20: mol_type = other RNA
accggagggggagggagaag

SEQ ID NO: 1578 - RNA, 20 nt, synthetic construct
  source 1..20: mol_type = other RNA
accgggcccttgctactggc

SEQ ID NO: 1579 - RNA, 20 nt, synthetic construct
  source 1..20: mol_type = other RNA
accgtaccaacgcccgcctc

SEQ ID NO: 1580 - RNA, 20 nt, synthetic construct
  source 1..20: mol_type = other RNA
accgttgcaacaccccattt

SEQ ID NO: 1581 - RNA, 20 nt, synthetic construct
  source 1..20: mol_type = other RNA
acctacccgccccacccagg

SEQ ID NO: 1582 - RNA, 20 nt, synthetic construct
  source 1..20: mol_type = other RNA
acctacctacccgccccacc

SEQ ID NO: 1583 - RNA, 20 nt, synthetic construct
  source 1..20: mol_type = other RNA
acctacttgaaccagggctc

SEQ ID NO: 1584 - RNA, 20 nt, synthetic construct
  source 1..20: mol_type = other RNA
acctagccgaggctctctga

SEQ ID NO: 1585 - RNA, 20 nt, synthetic construct
  source 1..20: mol_type = other RNA
acctcacgatcgggccccag

SEQ ID NO: 1586 - RNA, 20 nt, synthetic construct
  source 1..20: mol_type = other RNA
acctcacgggtacgggccat

SEQ ID NO: 1587 - RNA, 20 nt, synthetic construct
  source 1..20: mol_type = other RNA
acctcagatggctgcttccc

SEQ ID NO: 1588 - RNA, 20 nt, synthetic construct
  source 1..20: mol_type = other RNA
acctcccctcccaccagagt

SEQ ID NO: 1589 - RNA, 20 nt, synthetic construct
  source 1..20: mol_type = other RNA
acctcctccgtctccccgcg

SEQ ID NO: 1590 - RNA, 20 nt, synthetic construct
  source 1..20: mol_type = other RNA
acctgattggctgtcgaagc

SEQ ID NO: 1591 - RNA, 20 nt, synthetic construct
  source 1..20: mol_type = other RNA
acctgctacaggcactcgtg

SEQ ID NO: 1592 - RNA, 20 nt, synthetic construct
  source 1..20: mol_type = other RNA
accttcgccacccccaccac

SEQ ID NO: 1593 - RNA, 20 nt, synthetic construct
  source 1..20: mol_type = other RNA
accttgtcccaggcgctgcc

SEQ ID NO: 1594 - RNA, 20 nt, synthetic construct
  source 1..20: mol_type = other RNA
acctttcccttgaggagagg

SEQ ID NO: 1595 - RNA, 20 nt, synthetic construct
  source 1..20: mol_type = other RNA
acgacacaatctggctcaac

SEQ ID NO: 1596 - RNA, 20 nt, synthetic construct
  source 1..20: mol_type = other RNA
acgacccaaggagagcgagc

SEQ ID NO: 1597 - RNA, 20 nt, synthetic construct
  source 1..20: mol_type = other RNA
acgagagggaaggcgtccag

SEQ ID NO: 1598 - RNA, 20 nt, synthetic construct
  source 1..20: mol_type = other RNA
acgaggctatctcagacacg

SEQ ID NO: 1599 - RNA, 20 nt, synthetic construct
  source 1..20: mol_type = other RNA
acgagtgcctgtagcaggtc

SEQ ID NO: 1600 - RNA, 20 nt, synthetic construct
  source 1..20: mol_type = other RNA
acgatcgggccccaggggag

SEQ ID NO: 1601 - RNA, 20 nt, synthetic construct
  source 1..20: mol_type = other RNA
acgatcttgtgagaatatct

SEQ ID NO: 1602 - RNA, 20 nt, synthetic construct
  source 1..20: mol_type = other RNA
acgcagagggaaagagaatt

SEQ ID NO: 1603 - RNA, 20 nt, synthetic construct
  source 1..20: mol_type = other RNA
acgcagccccagtcccgcca

SEQ ID NO: 1604 - RNA, 20 nt, synthetic construct
  source 1..20: mol_type = other RNA
acgcagccgcttagcgactc

SEQ ID NO: 1605 - RNA, 20 nt, synthetic construct
  source 1..20: mol_type = other RNA
acgccacggggagccagaga

SEQ ID NO: 1606 - RNA, 20 nt, synthetic construct
  source 1..20: mol_type = other RNA
acgccactgaccgcacgggg

SEQ ID NO: 1607 - RNA, 20 nt, synthetic construct
  source 1..20: mol_type = other RNA
acgccatttgtgttttcaca

SEQ ID NO: 1608 - RNA, 20 nt, synthetic construct
  source 1..20: mol_type = other RNA
acgcccaagaagtgagacaa

SEQ ID NO: 1609 - RNA, 20 nt, synthetic construct
  source 1..20: mol_type = other RNA
acgcccaaggcaagtaaaac

SEQ ID NO: 1610 - RNA, 20 nt, synthetic construct
  source 1..20: mol_type = other RNA
acgccccctcccgccgcgcc

SEQ ID NO: 1611 - RNA, 20 nt, synthetic construct
  source 1..20: mol_type = other RNA
acgcccgcgccagagccgat

SEQ ID NO: 1612 - RNA, 20 nt, synthetic construct
  source 1..20: mol_type = other RNA
acgccgtcgggagtacgcag

SEQ ID NO: 1613 - RNA, 20 nt, synthetic construct
  source 1..20: mol_type = other RNA
acgccgtggcgccgcgttgg

SEQ ID NO: 1614 - RNA, 20 nt, synthetic construct
  source 1..20: mol_type = other RNA
acgcctcttcaccccctttc

SEQ ID NO: 1615 - RNA, 20 nt, synthetic construct
  source 1..20: mol_type = other RNA
acgccttccctctcgttttc

SEQ ID NO: 1616 - RNA, 20 nt, synthetic construct
  source 1..20: mol_type = other RNA
acgcgagagtcgctaagcgg

SEQ ID NO: 1617 - RNA, 20 nt, synthetic construct
  source 1..20: mol_type = other RNA
acgcggcgccacggcgtttc

SEQ ID NO: 1618 - RNA, 20 nt, synthetic construct
  source 1..20: mol_type = other RNA
acgctgtggcacacgccacg

SEQ ID NO: 1619 - RNA, 20 nt, synthetic construct
  source 1..20: mol_type = other RNA
acgcttcccctcccccaacg

SEQ ID NO: 1620 - RNA, 20 nt, synthetic construct
  source 1..20: mol_type = other RNA
acggagccattgctctcgca

SEQ ID NO: 1621 - RNA, 20 nt, synthetic construct
  source 1..20: mol_type = other RNA
acggaggaggtgacccttcc

SEQ ID NO: 1622 - RNA, 20 nt, synthetic construct
  source 1..20: mol_type = other RNA
acggaggggagatcgcggcc

SEQ ID NO: 1623 - RNA, 20 nt, synthetic construct
  source 1..20: mol_type = other RNA
acggcactcccgggaggcgg

SEQ ID NO: 1624 - RNA, 20 nt, synthetic construct
  source 1..20: mol_type = other RNA
acggccaatcggcgacaaga

SEQ ID NO: 1625 - RNA, 20 nt, synthetic construct
  source 1..20: mol_type = other RNA
acggcccccctagccaccca

SEQ ID NO: 1626 - RNA, 20 nt, synthetic construct
  source 1..20: mol_type = other RNA
acggcgggaggagaaacggc

SEQ ID NO: 1627 - RNA, 20 nt, synthetic construct
  source 1..20: mol_type = other RNA
acggcgtaactgacaggagc

SEQ ID NO: 1628 - RNA, 20 nt, synthetic construct
  source 1..20: mol_type = other RNA
acggcgtttcctggccggga

SEQ ID NO: 1629 - RNA, 20 nt, synthetic construct
  source 1..20: mol_type = other RNA
acgggaaaggcaacccccgc

SEQ ID NO: 1630 - RNA, 20 nt, synthetic construct
  source 1..20: mol_type = other RNA
acgggccattcccggccagg

SEQ ID NO: 1631 - RNA, 20 nt, synthetic construct
  source 1..20: mol_type = other RNA
acggggagccagagaacgtg

SEQ ID NO: 1632 - RNA, 20 nt, synthetic construct
  source 1..20: mol_type = other RNA
acggggattcccagcgccgg

SEQ ID NO: 1633 - RNA, 20 nt, synthetic construct
  source 1..20: mol_type = other RNA
acgggggtagggagtggggg

SEQ ID NO: 1634 - RNA, 20 nt, synthetic construct
  source 1..20: mol_type = other RNA
acgggtacgggccattcccg

SEQ ID NO: 1635 - RNA, 20 nt, synthetic construct
  source 1..20: mol_type = other RNA
acggtcctccccgaggccga

SEQ ID NO: 1636 - RNA, 20 nt, synthetic construct
  source 1..20: mol_type = other RNA
acggtgtgtgcaaggcggcg

SEQ ID NO: 1637 - RNA, 20 nt, synthetic construct
  source 1..20: mol_type = other RNA
acgtaacaaacattatgttc

SEQ ID NO: 1638 - RNA, 20 nt, synthetic construct
  source 1..20: mol_type = other RNA
acgtggagtaggcagttccc

SEQ ID NO: 1639 - RNA, 20 nt, synthetic construct
  source 1..20: mol_type = other RNA
acgtggcaggaagcgcgcgc

SEQ ID NO: 1640 - RNA, 20 nt, synthetic construct
  source 1..20: mol_type = other RNA
acgtgtggtgggggtggcga

SEQ ID NO: 1641 - RNA, 20 nt, synthetic construct
  source 1..20: mol_type = other RNA
acgttctctggctccccgtg

SEQ ID NO: 1642 - RNA, 20 nt, synthetic construct
  source 1..20: mol_type = other RNA
acgttgcgcaggggcgcggg

SEQ ID NO: 1643 - RNA, 20 nt, synthetic construct
  source 1..20: mol_type = other RNA
acgttgggagggaaaggggt

SEQ ID NO: 1644 - RNA, 20 nt, synthetic construct
  source 1..20: mol_type = other RNA
acgtttacctttcccttgag

SEQ ID NO: 1645 - RNA, 20 nt, synthetic construct
  source 1..20: mol_type = other RNA
actactgtgttggcggactg

SEQ ID NO: 1646 - RNA, 20 nt, synthetic construct
  source 1..20: mol_type = other RNA
actcacgcagccccagtccc

SEQ ID NO: 1647 - RNA, 20 nt, synthetic construct
  source 1..20: mol_type = other RNA
actcagcccgctgcccgagc

SEQ ID NO: 1648 - RNA, 20 nt, synthetic construct
  source 1..20: mol_type = other RNA
actccaaccagaatacgcca

SEQ ID NO: 1649 - RNA, 20 nt, synthetic construct
  source 1..20: mol_type = other RNA
actccacgtttacctttccc

SEQ ID NO: 1650 - RNA, 20 nt, synthetic construct
  source 1..20: mol_type = other RNA
actccaggctcgaaccctac

SEQ ID NO: 1651 - RNA, 20 nt, synthetic construct
  source 1..20: mol_type = other RNA
actcccccgaaggaagggga

SEQ ID NO: 1652 - RNA, 20 nt, synthetic construct
  source 1..20: mol_type = other RNA
actccccctttcatgttttt

SEQ ID NO: 1653 - RNA, 20 nt, synthetic construct
  source 1..20: mol_type = other RNA
actcccgacggcgtaactga

SEQ ID NO: 1654 - RNA, 20 nt, synthetic construct
  source 1..20: mol_type = other RNA
actcccgggaggcggcagga

SEQ ID NO: 1655 - RNA, 20 nt, synthetic construct
  source 1..20: mol_type = other RNA
actccctacccccgttctcg

SEQ ID NO: 1656 - RNA, 20 nt, synthetic construct
  source 1..20: mol_type = other RNA
actcctcttcacattcccga

SEQ ID NO: 1657 - RNA, 20 nt, synthetic construct
  source 1..20: mol_type = other RNA
actcgagccagtagcaaggg

SEQ ID NO: 1658 - RNA, 20 nt, synthetic construct
  source 1..20: mol_type = other RNA
actcgagtcctgccgcctcc

SEQ ID NO: 1659 - RNA, 20 nt, synthetic construct
  source 1..20: mol_type = other RNA
actcgagttaggcccaacgc

SEQ ID NO: 1660 - RNA, 20 nt, synthetic construct
  source 1..20: mol_type = other RNA
actcgccgccaatcagcgga

SEQ ID NO: 1661 - RNA, 20 nt, synthetic construct
  source 1..20: mol_type = other RNA
actcgtgggggtgggggagg

SEQ ID NO: 1662 - RNA, 20 nt, synthetic construct
  source 1..20: mol_type = other RNA
actctatagaatcaattagc

SEQ ID NO: 1663 - RNA, 20 nt, synthetic construct
  source 1..20: mol_type = other RNA
actctcgcgttgccccctgg

SEQ ID NO: 1664 - RNA, 20 nt, synthetic construct
  source 1..20: mol_type = other RNA
actctgatcgctctgggggc

SEQ ID NO: 1665 - RNA, 20 nt, synthetic construct
  source 1..20: mol_type = other RNA
actctggtgggaggggaggt

SEQ ID NO: 1666 - RNA, 20 nt, synthetic construct
  source 1..20: mol_type = other RNA
actgacaggagctttactcc

SEQ ID NO: 1667 - RNA, 20 nt, synthetic construct
  source 1..20: mol_type = other RNA
actgaccctcccctcccgcc

SEQ ID NO: 1668 - RNA, 20 nt, synthetic construct
  source 1..20: mol_type = other RNA
actgaccgcacggggattcc

SEQ ID NO: 1669 - RNA, 20 nt, synthetic construct
  source 1..20: mol_type = other RNA
actgacgcccaagaagtgag

SEQ ID NO: 1670 - RNA, 20 nt, synthetic construct
  source 1..20: mol_type = other RNA
actgcagcatccatatccaa

SEQ ID NO: 1671 - RNA, 20 nt, synthetic construct
  source 1..20: mol_type = other RNA
actgcctactccacgtttac

SEQ ID NO: 1672 - RNA, 20 nt, synthetic construct
  source 1..20: mol_type = other RNA
actgcggcgctcggcctcgg

SEQ ID NO: 1673 - RNA, 20 nt, synthetic construct
  source 1..20: mol_type = other RNA
actggcgggactggggctgc

SEQ ID NO: 1674 - RNA, 20 nt, synthetic construct
  source 1..20: mol_type = other RNA
actggctcgagtctcacatg

SEQ ID NO: 1675 - RNA, 20 nt, synthetic construct
  source 1..20: mol_type = other RNA
actggggctgcgtgagtctc

SEQ ID NO: 1676 - RNA, 20 nt, synthetic construct
  source 1..20: mol_type = other RNA
actggggggatgggtggcta

SEQ ID NO: 1677 - RNA, 20 nt, synthetic construct
  source 1..20: mol_type = other RNA
actgtgttggcggactggcg

SEQ ID NO: 1678 - RNA, 20 nt, synthetic construct
  source 1..20: mol_type = other RNA
actgttgggaaagccccttc

SEQ ID NO: 1679 - RNA, 20 nt, synthetic construct
  source 1..20: mol_type = other RNA
acttacacgcagagggaaag

SEQ ID NO: 1680 - RNA, 20 nt, synthetic construct
  source 1..20: mol_type = other RNA
acttcccacgggaaaggcaa

SEQ ID NO: 1681 - RNA, 20 nt, synthetic construct
  source 1..20: mol_type = other RNA
acttctcacccccctcgccg

SEQ ID NO: 1682 - RNA, 20 nt, synthetic construct
  source 1..20: mol_type = other RNA
acttctggatggcggcggcc

SEQ ID NO: 1683 - RNA, 20 nt, synthetic construct
  source 1..20: mol_type = other RNA
acttcttgggcgtcagtggt

SEQ ID NO: 1684 - RNA, 20 nt, synthetic construct
  source 1..20: mol_type = other RNA
acttgaaccagggctctttc

SEQ ID NO: 1685 - RNA, 20 nt, synthetic construct
  source 1..20: mol_type = other RNA
acttgccttgggcgtggaga

SEQ ID NO: 1686 - RNA, 20 nt, synthetic construct
  source 1..20: mol_type = other RNA
actttccctctcatgcgatt

SEQ ID NO: 1687 - RNA, 20 nt, synthetic construct
  source 1..20: mol_type = other RNA
agaaaaatattccctttatg

SEQ ID NO: 1688 - RNA, 20 nt, synthetic construct
  source 1..20: mol_type = other RNA
agaaaacgagagggaaggcg

SEQ ID NO: 1689 - RNA, 20 nt, synthetic construct
  source 1..20: mol_type = other RNA
agaaaagagaccgaacctca

SEQ ID NO: 1690 - RNA, 20 nt, synthetic construct
  source 1..20: mol_type = other RNA
agaaacggccaatcggcgac

SEQ ID NO: 1691 - RNA, 20 nt, synthetic construct
  source 1..20: mol_type = other RNA
agaaagaccactgacgccca

SEQ ID NO: 1692 - RNA, 20 nt, synthetic construct
  source 1..20: mol_type = other RNA
agaaaggcggagcgagccaa

SEQ ID NO: 1693 - RNA, 20 nt, synthetic construct
  source 1..20: mol_type = other RNA
agaacgatcttgtgagaata

SEQ ID NO: 1694 - RNA, 20 nt, synthetic construct
  source 1..20: mol_type = other RNA
agaacgggggtagggagtgg

SEQ ID NO: 1695 - RNA, 20 nt, synthetic construct
  source 1..20: mol_type = other RNA
agaacgtgtggtgggggtgg

SEQ ID NO: 1696 - RNA, 20 nt, synthetic construct
  source 1..20: mol_type = other RNA
agaagaggctgtgcttcggc

SEQ ID NO: 1697 - RNA, 20 nt, synthetic construct
  source 1..20: mol_type = other RNA
agaagggagcggaaaatgct

SEQ ID NO: 1698 - RNA, 20 nt, synthetic construct
  source 1..20: mol_type = other RNA
agaaggggctttcccaacag

SEQ ID NO: 1699 - RNA, 20 nt, synthetic construct
  source 1..20: mol_type = other RNA
agaagtctcggccggcagcc

SEQ ID NO: 1700 - RNA, 20 nt, synthetic construct
  source 1..20: mol_type = other RNA
agaagtgagacaagcaagga

SEQ ID NO: 1701 - RNA, 20 nt, synthetic construct
  source 1..20: mol_type = other RNA
agaagtggcagcatcctcct

SEQ ID NO: 1702 - RNA, 20 nt, synthetic construct
  source 1..20: mol_type = other RNA
agaatacgccatttgtgttt

SEQ ID NO: 1703 - RNA, 20 nt, synthetic construct
  source 1..20: mol_type = other RNA
agaatatcttcaaaggcaga

SEQ ID NO: 1704 - RNA, 20 nt, synthetic construct
  source 1..20: mol_type = other RNA
agaatcaattagcatagaag

SEQ ID NO: 1705 - RNA, 20 nt, synthetic construct
  source 1..20: mol_type = other RNA
agaattcataaagggaatat

SEQ ID NO: 1706 - RNA, 20 nt, synthetic construct
  source 1..20: mol_type = other RNA
agacaactctgatcgctctg

SEQ ID NO: 1707 - RNA, 20 nt, synthetic construct
  source 1..20: mol_type = other RNA
agacaagcaaggactctata

SEQ ID NO: 1708 - RNA, 20 nt, synthetic construct
  source 1..20: mol_type = other RNA
agacaagcaggcggcgggta

SEQ ID NO: 1709 - RNA, 20 nt, synthetic construct
  source 1..20: mol_type = other RNA
agacaagcccgacctgctac

SEQ ID NO: 1710 - RNA, 20 nt, synthetic construct
  source 1..20: mol_type = other RNA
agacacgctgtggcacacgc

SEQ ID NO: 1711 - RNA, 20 nt, synthetic construct
  source 1..20: mol_type = other RNA
agacactgcggcgctcggcc

SEQ ID NO: 1712 - RNA, 20 nt, synthetic construct
  source 1..20: mol_type = other RNA
agaccactgacgcccaagaa

SEQ ID NO: 1713 - RNA, 20 nt, synthetic construct
  source 1..20: mol_type = other RNA
agaccgaacctcacgatcgg

SEQ ID NO: 1714 - RNA, 20 nt, synthetic construct
  source 1..20: mol_type = other RNA
agacggaggaggtgaccctt

SEQ ID NO: 1715 - RNA, 20 nt, synthetic construct
  source 1..20: mol_type = other RNA
agacggcccccctagccacc

SEQ ID NO: 1716 - RNA, 20 nt, synthetic construct
  source 1..20: mol_type = other RNA
agactcacgcagccccagtc

SEQ ID NO: 1717 - RNA, 20 nt, synthetic construct
  source 1..20: mol_type = other RNA
agactcgagccagtagcaag

SEQ ID NO: 1718 - RNA, 20 nt, synthetic construct
  source 1..20: mol_type = other RNA
agacttctggatggcggcgg

SEQ ID NO: 1719 - RNA, 20 nt, synthetic construct
  source 1..20: mol_type = other RNA
agagaaagaccactgacgcc

SEQ ID NO: 1720 - RNA, 20 nt, synthetic construct
  source 1..20: mol_type = other RNA
agagaacgtgtggtgggggt

SEQ ID NO: 1721 - RNA, 20 nt, synthetic construct
  source 1..20: mol_type = other RNA
agagaagaggctgtgcttcg

SEQ ID NO: 1722 - RNA, 20 nt, synthetic construct
  source 1..20: mol_type = other RNA
agagaattcataaagggaat

SEQ ID NO: 1723 - RNA, 20 nt, synthetic construct
  source 1..20: mol_type = other RNA
agagaccgaacctcacgatc

SEQ ID NO: 1724 - RNA, 20 nt, synthetic construct
  source 1..20: mol_type = other RNA
agagactcacgcagccccag

SEQ ID NO: 1725 - RNA, 20 nt, synthetic construct
  source 1..20: mol_type = other RNA
agagagatccccctctaatc

SEQ ID NO: 1726 - RNA, 20 nt, synthetic construct
  source 1..20: mol_type = other RNA
agagagcctcggctaggtag

SEQ ID NO: 1727 - RNA, 20 nt, synthetic construct
  source 1..20: mol_type = other RNA
agagatccccctctaatcta

SEQ ID NO: 1728 - RNA, 20 nt, synthetic construct
  source 1..20: mol_type = other RNA
agagatgctgggtgtgcggg

SEQ ID NO: 1729 - RNA, 20 nt, synthetic construct
  source 1..20: mol_type = other RNA
agagcaatggctccgtccgg

SEQ ID NO: 1730 - RNA, 20 nt, synthetic construct
  source 1..20: mol_type = other RNA
agagccctggttcaagtagg

SEQ ID NO: 1731 - RNA, 20 nt, synthetic construct
  source 1..20: mol_type = other RNA
agagccgatttcactgaccc

SEQ ID NO: 1732 - RNA, 20 nt, synthetic construct
  source 1..20: mol_type = other RNA
agagcctcggctaggtaggg

SEQ ID NO: 1733 - RNA, 20 nt, synthetic construct
  source 1..20: mol_type = other RNA
agagcgagcgcggggagacg

SEQ ID NO: 1734 - RNA, 20 nt, synthetic construct
  source 1..20: mol_type = other RNA
agagcgatcagagttgtctg

SEQ ID NO: 1735 - RNA, 20 nt, synthetic construct
  source 1..20: mol_type = other RNA
agagcttggggagggccagg

SEQ ID NO: 1736 - RNA, 20 nt, synthetic construct
  source 1..20: mol_type = other RNA
agaggagtgtaggaaagagc

SEQ ID NO: 1737 - RNA, 20 nt, synthetic construct
  source 1..20: mol_type = other RNA
agaggccaatggcgcggcgg

SEQ ID NO: 1738 - RNA, 20 nt, synthetic construct
  source 1..20: mol_type = other RNA
agaggcctctcctcaaggga

SEQ ID NO: 1739 - RNA, 20 nt, synthetic construct
  source 1..20: mol_type = other RNA
agaggcctcttgctgccctc

SEQ ID NO: 1740 - RNA, 20 nt, synthetic construct
  source 1..20: mol_type = other RNA
agaggcgttgggggagggga

SEQ ID NO: 1741 - RNA, 20 nt, synthetic construct
  source 1..20: mol_type = other RNA
agaggctagccggaagcgct

SEQ ID NO: 1742 - RNA, 20 nt, synthetic construct
  source 1..20: mol_type = other RNA
agaggctgtgcttcggcgct

SEQ ID NO: 1743 - RNA, 20 nt, synthetic construct
  source 1..20: mol_type = other RNA
agagggaaagagaattcata

SEQ ID NO: 1744 - RNA, 20 nt, synthetic construct
  source 1..20: mol_type = other RNA
agagggaaagttaaactgtt

SEQ ID NO: 1745 - RNA, 20 nt, synthetic construct
  source 1..20: mol_type = other RNA
agagggaaggcgtccaggaa

SEQ ID NO: 1746 - RNA, 20 nt, synthetic construct
  source 1..20: mol_type = other RNA
agagggaggagcgcttccgg

SEQ ID NO: 1747 - RNA, 20 nt, synthetic construct
  source 1..20: mol_type = other RNA
agagggggatctctctccct

SEQ ID NO: 1748 - RNA, 20 nt, synthetic construct
  source 1..20: mol_type = other RNA
agaggggggccggcactact

SEQ ID NO: 1749 - RNA, 20 nt, synthetic construct
  source 1..20: mol_type = other RNA
agagtccttgcttgtctcac

SEQ ID NO: 1750 - RNA, 20 nt, synthetic construct
  source 1..20: mol_type = other RNA
agagtcgctaagcggctgcg

SEQ ID NO: 1751 - RNA, 20 nt, synthetic construct
  source 1..20: mol_type = other RNA
agagttccgctcccctacct

SEQ ID NO: 1752 - RNA, 20 nt, synthetic construct
  source 1..20: mol_type = other RNA
agagttgtctgtcacaaggc

SEQ ID NO: 1753 - RNA, 20 nt, synthetic construct
  source 1..20: mol_type = other RNA
agatagcctcgttgaatgtg

SEQ ID NO: 1754 - RNA, 20 nt, synthetic construct
  source 1..20: mol_type = other RNA
agatattctcacaagatcgt

SEQ ID NO: 1755 - RNA, 20 nt, synthetic construct
  source 1..20: mol_type = other RNA
agatccccctctaatctagg

SEQ ID NO: 1756 - RNA, 20 nt, synthetic construct
  source 1..20: mol_type = other RNA
agatcgcggcccccagagcg

SEQ ID NO: 1757 - RNA, 20 nt, synthetic construct
  source 1..20: mol_type = other RNA
agatcgttctccacgcccaa

SEQ ID NO: 1758 - RNA, 20 nt, synthetic construct
  source 1..20: mol_type = other RNA
agatgctgggtgtgcgggcg

SEQ ID NO: 1759 - RNA, 20 nt, synthetic construct
  source 1..20: mol_type = other RNA
agatggctgcttcccaaagg

SEQ ID NO: 1760 - RNA, 20 nt, synthetic construct
  source 1..20: mol_type = other RNA
agattacggaggggagatcg

SEQ ID NO: 1761 - RNA, 20 nt, synthetic construct
  source 1..20: mol_type = other RNA
agattagagggggatctctc

SEQ ID NO: 1762 - RNA, 20 nt, synthetic construct
  source 1..20: mol_type = other RNA
agattgtgtcgttttacttg

SEQ ID NO: 1763 - RNA, 20 nt, synthetic construct
  source 1..20: mol_type = other RNA
agcaagaggcctctcctcaa

SEQ ID NO: 1764 - RNA, 20 nt, synthetic construct
  source 1..20: mol_type = other RNA
agcaaggactctatagaatc

SEQ ID NO: 1765 - RNA, 20 nt, synthetic construct
  source 1..20: mol_type = other RNA
agcaagggcccggtcccaca

SEQ ID NO: 1766 - RNA, 20 nt, synthetic construct
  source 1..20: mol_type = other RNA
agcaatggctccgtccggtt

SEQ ID NO: 1767 - RNA, 20 nt, synthetic construct
  source 1..20: mol_type = other RNA
agcacagcctcttctctagg

SEQ ID NO: 1768 - RNA, 20 nt, synthetic construct
  source 1..20: mol_type = other RNA
agcagccatctgaggtggga

SEQ ID NO: 1769 - RNA, 20 nt, synthetic construct
  source 1..20: mol_type = other RNA
agcaggcggcgggtaaaccg

SEQ ID NO: 1770 - RNA, 20 nt, synthetic construct
  source 1..20: mol_type = other RNA
agcaggtcgggcttgtctcg

SEQ ID NO: 1771 - RNA, 20 nt, synthetic construct
  source 1..20: mol_type = other RNA
agcatagaaggggctttccc

SEQ ID NO: 1772 - RNA, 20 nt, synthetic construct
  source 1..20: mol_type = other RNA
agcatccatatccaagagaa

SEQ ID NO: 1773 - RNA, 20 nt, synthetic construct
  source 1..20: mol_type = other RNA
agcatcctcctaagagcttg

SEQ ID NO: 1774 - RNA, 20 nt, synthetic construct
  source 1..20: mol_type = other RNA
agcatctctacaccccacct

SEQ ID NO: 1775 - RNA, 20 nt, synthetic construct
  source 1..20: mol_type = other RNA
agcattttccgctcccttct

SEQ ID NO: 1776 - RNA, 20 nt, synthetic construct
  source 1..20: mol_type = other RNA
agccaatcaggtgtcgaaga

SEQ ID NO: 1777 - RNA, 20 nt, synthetic construct
  source 1..20: mol_type = other RNA
agccaccagacggcccccct

SEQ ID NO: 1778 - RNA, 20 nt, synthetic construct
  source 1..20: mol_type = other RNA
agccacccatccccccagtg

SEQ ID NO: 1779 - RNA, 20 nt, synthetic construct
  source 1..20: mol_type = other RNA
agccacccctttccctccca

SEQ ID NO: 1780 - RNA, 20 nt, synthetic construct
  source 1..20: mol_type = other RNA
agccagaaaacgagagggaa

SEQ ID NO: 1781 - RNA, 20 nt, synthetic construct
  source 1..20: mol_type = other RNA
agccagagaacgtgtggtgg

SEQ ID NO: 1782 - RNA, 20 nt, synthetic construct
  source 1..20: mol_type = other RNA
agccagattgtgtcgtttta

SEQ ID NO: 1783 - RNA, 20 nt, synthetic construct
  source 1..20: mol_type = other RNA
agccagtagcaagggcccgg

SEQ ID NO: 1784 - RNA, 20 nt, synthetic construct
  source 1..20: mol_type = other RNA
agccatctgaggtgggaagc

SEQ ID NO: 1785 - RNA, 20 nt, synthetic construct
  source 1..20: mol_type = other RNA
agccattgctctcgcagagg

SEQ ID NO: 1786 - RNA, 20 nt, synthetic construct
  source 1..20: mol_type = other RNA
agccccagtcccgccagtcc

SEQ ID NO: 1787 - RNA, 20 nt, synthetic construct
  source 1..20: mol_type = other RNA
agccccttctatgctaattg

SEQ ID NO: 1788 - RNA, 20 nt, synthetic construct
  source 1..20: mol_type = other RNA
agcccgacctgctacaggca

SEQ ID NO: 1789 - RNA, 20 nt, synthetic construct
  source 1..20: mol_type = other RNA
agcccgctgcccgagcggaa

SEQ ID NO: 1790 - RNA, 20 nt, synthetic construct
  source 1..20: mol_type = other RNA
agccctggttcaagtaggta

SEQ ID NO: 1791 - RNA, 20 nt, synthetic construct
  source 1..20: mol_type = other RNA
agccgaggctctctgaggag

SEQ ID NO: 1792 - RNA, 20 nt, synthetic construct
  source 1..20: mol_type = other RNA
agccgatttcactgaccctc

SEQ ID NO: 1793 - RNA, 20 nt, synthetic construct
  source 1..20: mol_type = other RNA
agccgccggggccgcctaga

SEQ ID NO: 1794 - RNA, 20 nt, synthetic construct
  source 1..20: mol_type = other RNA
agccgcggccgccgccatcc

SEQ ID NO: 1795 - RNA, 20 nt, synthetic construct
  source 1..20: mol_type = other RNA
agccgcttagcgactctcgc

SEQ ID NO: 1796 - RNA, 20 nt, synthetic construct
  source 1..20: mol_type = other RNA
agccggaagcgctcctccct

SEQ ID NO: 1797 - RNA, 20 nt, synthetic construct
  source 1..20: mol_type = other RNA
agccggaccgacccccgctc

SEQ ID NO: 1798 - RNA, 20 nt, synthetic construct
  source 1..20: mol_type = other RNA
agccggagcgccgaagcaca

SEQ ID NO: 1799 - RNA, 20 nt, synthetic construct
  source 1..20: mol_type = other RNA
agcctcggctaggtagggga

SEQ ID NO: 1800 - RNA, 20 nt, synthetic construct
  source 1..20: mol_type = other RNA
agcctcgttgaatgtgtagg

SEQ ID NO: 1801 - RNA, 20 nt, synthetic construct
  source 1..20: mol_type = other RNA
agcctcttctctaggcggcc

SEQ ID NO: 1802 - RNA, 20 nt, synthetic construct
  source 1..20: mol_type = other RNA
agcctcttgtcgccgattgg

SEQ ID NO: 1803 - RNA, 20 nt, synthetic construct
  source 1..20: mol_type = other RNA
agcctggagttgagccagat

SEQ ID NO: 1804 - RNA, 20 nt, synthetic construct
  source 1..20: mol_type = other RNA
agcgaaaccactgcgcgggg

SEQ ID NO: 1805 - RNA, 20 nt, synthetic construct
  source 1..20: mol_type = other RNA
agcgactctcgcgttgcccc

SEQ ID NO: 1806 - RNA, 20 nt, synthetic construct
  source 1..20: mol_type = other RNA
agcgagcgcggggagacgga

SEQ ID NO: 1807 - RNA, 20 nt, synthetic construct
  source 1..20: mol_type = other RNA
agcgatcagagttgtctgtc

SEQ ID NO: 1808 - RNA, 20 nt, synthetic construct
  source 1..20: mol_type = other RNA
agcgccgaagcacagcctct

SEQ ID NO: 1809 - RNA, 20 nt, synthetic construct
  source 1..20: mol_type = other RNA
agcgcctgggacaaggtaag

SEQ ID NO: 1810 - RNA, 20 nt, synthetic construct
  source 1..20: mol_type = other RNA
agcgcgcgcttcctgccacg

SEQ ID NO: 1811 - RNA, 20 nt, synthetic construct
  source 1..20: mol_type = other RNA
agcgcggggagacggaggag

SEQ ID NO: 1812 - RNA, 20 nt, synthetic construct
  source 1..20: mol_type = other RNA
agcgctcctccctctgcgag

SEQ ID NO: 1813 - RNA, 20 nt, synthetic construct
  source 1..20: mol_type = other RNA
agcgcttccggctagcctct

SEQ ID NO: 1814 - RNA, 20 nt, synthetic construct
  source 1..20: mol_type = other RNA
agcggaaaatgctcgaaacc

SEQ ID NO: 1815 - RNA, 20 nt, synthetic construct
  source 1..20: mol_type = other RNA
agcggaaacgccactgaccg

SEQ ID NO: 1816 - RNA, 20 nt, synthetic construct
  source 1..20: mol_type = other RNA
agcggaactctggtgggagg

SEQ ID NO: 1817 - RNA, 20 nt, synthetic construct
  source 1..20: mol_type = other RNA
agcggaagccgccggggccg

SEQ ID NO: 1818 - RNA, 20 nt, synthetic construct
  source 1..20: mol_type = other RNA
agcggagggcagcaagaggc

SEQ ID NO: 1819 - RNA, 20 nt, synthetic construct
  source 1..20: mol_type = other RNA
agcggctgcgtactcccgac

SEQ ID NO: 1820 - RNA, 20 nt, synthetic construct
  source 1..20: mol_type = other RNA
agcgggctgagtgagctgcc

SEQ ID NO: 1821 - RNA, 20 nt, synthetic construct
  source 1..20: mol_type = other RNA
agcgtcctgacccaggaaaa

SEQ ID NO: 1822 - RNA, 20 nt, synthetic construct
  source 1..20: mol_type = other RNA
agcgtgtctgagatagcctc

SEQ ID NO: 1823 - RNA, 20 nt, synthetic construct
  source 1..20: mol_type = other RNA
agctcactcagcccgctgcc

SEQ ID NO: 1824 - RNA, 20 nt, synthetic construct
  source 1..20: mol_type = other RNA
agctcctgtcagttacgccg

SEQ ID NO: 1825 - RNA, 20 nt, synthetic construct
  source 1..20: mol_type = other RNA
agctcttaggaggatgctgc

SEQ ID NO: 1826 - RNA, 20 nt, synthetic construct
  source 1..20: mol_type = other RNA
agctgtgggaccgggccctt

SEQ ID NO: 1827 - RNA, 20 nt, synthetic construct
  source 1..20: mol_type = other RNA
agcttcgacagccaatcagg

SEQ ID NO: 1828 - RNA, 20 nt, synthetic construct
  source 1..20: mol_type = other RNA
agcttggggagggccaggcc

SEQ ID NO: 1829 - RNA, 20 nt, synthetic construct
  source 1..20: mol_type = other RNA
agctttactccaaccagaat

SEQ ID NO: 1830 - RNA, 20 nt, synthetic construct
  source 1..20: mol_type = other RNA
aggaaaaacatgaaaggggg

SEQ ID NO: 1831 - RNA, 20 nt, synthetic construct
  source 1..20: mol_type = other RNA
aggaaacgccgtggcgccgc

SEQ ID NO: 1832 - RNA, 20 nt, synthetic construct
  source 1..20: mol_type = other RNA
aggaaagagccctggttcaa

SEQ ID NO: 1833 - RNA, 20 nt, synthetic construct
  source 1..20: mol_type = other RNA
aggaaagggggtgaagaggc

SEQ ID NO: 1834 - RNA, 20 nt, synthetic construct
  source 1..20: mol_type = other RNA
aggaagattacggaggggag

SEQ ID NO: 1835 - RNA, 20 nt, synthetic construct
  source 1..20: mol_type = other RNA
aggaaggggagggtgggagg

SEQ ID NO: 1836 - RNA, 20 nt, synthetic construct
  source 1..20: mol_type = other RNA
aggaccgtaccaacgcccgc

SEQ ID NO: 1837 - RNA, 20 nt, synthetic construct
  source 1..20: mol_type = other RNA
aggacgcccgcgccagagcc

SEQ ID NO: 1838 - RNA, 20 nt, synthetic construct
  source 1..20: mol_type = other RNA
aggacgcttcccctccccca

SEQ ID NO: 1839 - RNA, 20 nt, synthetic construct
  source 1..20: mol_type = other RNA
aggactcgagttaggcccaa

SEQ ID NO: 1840 - RNA, 20 nt, synthetic construct
  source 1..20: mol_type = other RNA
aggactctatagaatcaatt

SEQ ID NO: 1841 - RNA, 20 nt, synthetic construct
  source 1..20: mol_type = other RNA
aggagaaacggccaatcggc

SEQ ID NO: 1842 - RNA, 20 nt, synthetic construct
  source 1..20: mol_type = other RNA
aggagagcgagcgcggggag

SEQ ID NO: 1843 - RNA, 20 nt, synthetic construct
  source 1..20: mol_type = other RNA
aggagaggcctcttgctgcc

SEQ ID NO: 1844 - RNA, 20 nt, synthetic construct
  source 1..20: mol_type = other RNA
aggagccggagcgccgaagc

SEQ ID NO: 1845 - RNA, 20 nt, synthetic construct
  source 1..20: mol_type = other RNA
aggagcgcttccggctagcc

SEQ ID NO: 1846 - RNA, 20 nt, synthetic construct
  source 1..20: mol_type = other RNA
aggagctttactccaaccag

SEQ ID NO: 1847 - RNA, 20 nt, synthetic construct
  source 1..20: mol_type = other RNA
aggaggatgctgccacttct

SEQ ID NO: 1848 - RNA, 20 nt, synthetic construct
  source 1..20: mol_type = other RNA
aggaggtgacccttccctcc

SEQ ID NO: 1849 - RNA, 20 nt, synthetic construct
  source 1..20: mol_type = other RNA
aggagtgtaggaaagagccc

SEQ ID NO: 1850 - RNA, 20 nt, synthetic construct
  source 1..20: mol_type = other RNA
aggatgctgccacttctcac

SEQ ID NO: 1851 - RNA, 20 nt, synthetic construct
  source 1..20: mol_type = other RNA
aggcaacccccgcaagccac

SEQ ID NO: 1852 - RNA, 20 nt, synthetic construct
  source 1..20: mol_type = other RNA
aggcaagtaaaacgacacaa

SEQ ID NO: 1853 - RNA, 20 nt, synthetic construct
  source 1..20: mol_type = other RNA
aggcactcgtgggggtgggg

SEQ ID NO: 1854 - RNA, 20 nt, synthetic construct
  source 1..20: mol_type = other RNA
aggcagaaaaatattccctt

SEQ ID NO: 1855 - RNA, 20 nt, synthetic construct
  source 1..20: mol_type = other RNA
aggcagttcccaggaaaggg

SEQ ID NO: 1856 - RNA, 20 nt, synthetic construct
  source 1..20: mol_type = other RNA
aggcattaccttcgccaccc

SEQ ID NO: 1857 - RNA, 20 nt, synthetic construct
  source 1..20: mol_type = other RNA
aggccaatggcgcggcggga

SEQ ID NO: 1858 - RNA, 20 nt, synthetic construct
  source 1..20: mol_type = other RNA
aggcccaacgcggcgccacg

SEQ ID NO: 1859 - RNA, 20 nt, synthetic construct
  source 1..20: mol_type = other RNA
aggcccacgacccaaggaga

SEQ ID NO: 1860 - RNA, 20 nt, synthetic construct
  source 1..20: mol_type = other RNA
aggccccggcagcgcctggg

SEQ ID NO: 1861 - RNA, 20 nt, synthetic construct
  source 1..20: mol_type = other RNA
aggccgagcgccgcagtgtc

SEQ ID NO: 1862 - RNA, 20 nt, synthetic construct
  source 1..20: mol_type = other RNA
aggccgcgagaacgggggta

SEQ ID NO: 1863 - RNA, 20 nt, synthetic construct
  source 1..20: mol_type = other RNA
aggccggccgcgcccgcaca

SEQ ID NO: 1864 - RNA, 20 nt, synthetic construct
  source 1..20: mol_type = other RNA
aggcctctcctcaagggaaa

SEQ ID NO: 1865 - RNA, 20 nt, synthetic construct
  source 1..20: mol_type = other RNA
aggcctcttgctgccctccg

SEQ ID NO: 1866 - RNA, 20 nt, synthetic construct
  source 1..20: mol_type = other RNA
aggcgacccaactccccctt

SEQ ID NO: 1867 - RNA, 20 nt, synthetic construct
  source 1..20: mol_type = other RNA
aggcggagcgagccaaaggc

SEQ ID NO: 1868 - RNA, 20 nt, synthetic construct
  source 1..20: mol_type = other RNA
aggcggcaggactcgagtta

SEQ ID NO: 1869 - RNA, 20 nt, synthetic construct
  source 1..20: mol_type = other RNA
aggcggccccggcggcttcc

SEQ ID NO: 1870 - RNA, 20 nt, synthetic construct
  source 1..20: mol_type = other RNA
aggcggcgaggggggtgaga

SEQ ID NO: 1871 - RNA, 20 nt, synthetic construct
  source 1..20: mol_type = other RNA
aggcggcgggtaaaccgact

SEQ ID NO: 1872 - RNA, 20 nt, synthetic construct
  source 1..20: mol_type = other RNA
aggcgggcgttggtacggtc

SEQ ID NO: 1873 - RNA, 20 nt, synthetic construct
  source 1..20: mol_type = other RNA
aggcgtccaggaagattacg

SEQ ID NO: 1874 - RNA, 20 nt, synthetic construct
  source 1..20: mol_type = other RNA
aggcgttgggggaggggaag

SEQ ID NO: 1875 - RNA, 20 nt, synthetic construct
  source 1..20: mol_type = other RNA
aggctagccggaagcgctcc

SEQ ID NO: 1876 - RNA, 20 nt, synthetic construct
  source 1..20: mol_type = other RNA
aggctatctcagacacgctg

SEQ ID NO: 1877 - RNA, 20 nt, synthetic construct
  source 1..20: mol_type = other RNA
aggctcgaaccctacacatt

SEQ ID NO: 1878 - RNA, 20 nt, synthetic construct
  source 1..20: mol_type = other RNA
aggctctctgaggagccgga

SEQ ID NO: 1879 - RNA, 20 nt, synthetic construct
  source 1..20: mol_type = other RNA
aggctgtgcttcggcgctcc

SEQ ID NO: 1880 - RNA, 20 nt, synthetic construct
  source 1..20: mol_type = other RNA
agggaaagagaattcataaa

SEQ ID NO: 1881 - RNA, 20 nt, synthetic construct
  source 1..20: mol_type = other RNA
agggaaagaggggggccggc

SEQ ID NO: 1882 - RNA, 20 nt, synthetic construct
  source 1..20: mol_type = other RNA
agggaaaggggtggctggat

SEQ ID NO: 1883 - RNA, 20 nt, synthetic construct
  source 1..20: mol_type = other RNA
agggaaaggtaaacgtggag

SEQ ID NO: 1884 - RNA, 20 nt, synthetic construct
  source 1..20: mol_type = other RNA
agggaaagttaaactgttgg

SEQ ID NO: 1885 - RNA, 20 nt, synthetic construct
  source 1..20: mol_type = other RNA
agggaaggcgtccaggaaga

SEQ ID NO: 1886 - RNA, 20 nt, synthetic construct
  source 1..20: mol_type = other RNA
agggaagggtcacctcctcc

SEQ ID NO: 1887 - RNA, 20 nt, synthetic construct
  source 1..20: mol_type = other RNA
agggaatatttttctgcctt

SEQ ID NO: 1888 - RNA, 20 nt, synthetic construct
  source 1..20: mol_type = other RNA
agggagaagggagcggaaaa

SEQ ID NO: 1889 - RNA, 20 nt, synthetic construct
  source 1..20: mol_type = other RNA
agggagagagatccccctct

SEQ ID NO: 1890 - RNA, 20 nt, synthetic construct
  source 1..20: mol_type = other RNA
agggagcggaaaatgctcga

SEQ ID NO: 1891 - RNA, 20 nt, synthetic construct
  source 1..20: mol_type = other RNA
agggaggagcgcttccggct

SEQ ID NO: 1892 - RNA, 20 nt, synthetic construct
  source 1..20: mol_type = other RNA
agggaggcccgccctgcggc

SEQ ID NO: 1893 - RNA, 20 nt, synthetic construct
  source 1..20: mol_type = other RNA
agggagtgggggatcgggga

SEQ ID NO: 1894 - RNA, 20 nt, synthetic construct
  source 1..20: mol_type = other RNA
agggcagcaagaggcctctc

SEQ ID NO: 1895 - RNA, 20 nt, synthetic construct
  source 1..20: mol_type = other RNA
agggccaggcccacgaccca

SEQ ID NO: 1896 - RNA, 20 nt, synthetic construct
  source 1..20: mol_type = other RNA
agggccagggaaagaggggg

SEQ ID NO: 1897 - RNA, 20 nt, synthetic construct
  source 1..20: mol_type = other RNA
agggcccggtcccacagctt

SEQ ID NO: 1898 - RNA, 20 nt, synthetic construct
  source 1..20: mol_type = other RNA
agggcgagacaagcccgacc

SEQ ID NO: 1899 - RNA, 20 nt, synthetic construct
  source 1..20: mol_type = other RNA
agggcgggcctccctcccgc

SEQ ID NO: 1900 - RNA, 20 nt, synthetic construct
  source 1..20: mol_type = other RNA
agggctctttcctacactcc

SEQ ID NO: 1901 - RNA, 20 nt, synthetic construct
  source 1..20: mol_type = other RNA
aggggaagcgtcctgaccca

SEQ ID NO: 1902 - RNA, 20 nt, synthetic construct
  source 1..20: mol_type = other RNA
aggggagatcgcggccccca

SEQ ID NO: 1903 - RNA, 20 nt, synthetic construct
  source 1..20: mol_type = other RNA
aggggagcggaactctggtg

SEQ ID NO: 1904 - RNA, 20 nt, synthetic construct
  source 1..20: mol_type = other RNA
aggggagggaagggtcacct

SEQ ID NO: 1905 - RNA, 20 nt, synthetic construct
  source 1..20: mol_type = other RNA
aggggagggtcagtgaaatc

SEQ ID NO: 1906 - RNA, 20 nt, synthetic construct
  source 1..20: mol_type = other RNA
aggggagggtgggaggacgc

SEQ ID NO: 1907 - RNA, 20 nt, synthetic construct
  source 1..20: mol_type = other RNA
aggggaggtgcggtacactg

SEQ ID NO: 1908 - RNA, 20 nt, synthetic construct
  source 1..20: mol_type = other RNA
aggggctttcccaacagttt

SEQ ID NO: 1909 - RNA, 20 nt, synthetic construct
  source 1..20: mol_type = other RNA
agggggagggagaagggagc

SEQ ID NO: 1910 - RNA, 20 nt, synthetic construct
  source 1..20: mol_type = other RNA
agggggagttgggtcgccta

SEQ ID NO: 1911 - RNA, 20 nt, synthetic construct
  source 1..20: mol_type = other RNA
agggggatctctctccctgg

SEQ ID NO: 1912 - RNA, 20 nt, synthetic construct
  source 1..20: mol_type = other RNA
agggggcaacgcgagagtcg

SEQ ID NO: 1913 - RNA, 20 nt, synthetic construct
  source 1..20: mol_type = other RNA
aggggggccggcactactgt

SEQ ID NO: 1914 - RNA, 20 nt, synthetic construct
  source 1..20: mol_type = other RNA
aggggggccgtctggtggct

SEQ ID NO: 1915 - RNA, 20 nt, synthetic construct
  source 1..20: mol_type = other RNA
aggggggtgagaagtggcag

SEQ ID NO: 1916 - RNA, 20 nt, synthetic construct
  source 1..20: mol_type = other RNA
agggggtgaagaggcgttgg

SEQ ID NO: 1917 - RNA, 20 nt, synthetic construct
  source 1..20: mol_type = other RNA
aggggtggctggatgcaggc

SEQ ID NO: 1918 - RNA, 20 nt, synthetic construct
  source 1..20: mol_type = other RNA
agggtcacctcctccgtctc

SEQ ID NO: 1919 - RNA, 20 nt, synthetic construct
  source 1..20: mol_type = other RNA
agggtcagtgaaatcggctc

SEQ ID NO: 1920 - RNA, 20 nt, synthetic construct
  source 1..20: mol_type = other RNA
agggtccgacagaaaagaga

SEQ ID NO: 1921 - RNA, 20 nt, synthetic construct
  source 1..20: mol_type = other RNA
agggtgggaggacgcccgcg

SEQ ID NO: 1922 - RNA, 20 nt, synthetic construct
  source 1..20: mol_type = other RNA
agggttcgagcctggagttg

SEQ ID NO: 1923 - RNA, 20 nt, synthetic construct
  source 1..20: mol_type = other RNA
aggtaaacgtggagtaggca

SEQ ID NO: 1924 - RNA, 20 nt, synthetic construct
  source 1..20: mol_type = other RNA
aggtaaatcgcatgagaggg

SEQ ID NO: 1925 - RNA, 20 nt, synthetic construct
  source 1..20: mol_type = other RNA
aggtaagggtccgacagaaa

SEQ ID NO: 1926 - RNA, 20 nt, synthetic construct
  source 1..20: mol_type = other RNA
aggtaatgcctttgggaagc

SEQ ID NO: 1927 - RNA, 20 nt, synthetic construct
  source 1..20: mol_type = other RNA
aggtaggggagcggaactct

SEQ ID NO: 1928 - RNA, 20 nt, synthetic construct
  source 1..20: mol_type = other RNA
aggtaggtggggtgtagaga

SEQ ID NO: 1929 - RNA, 20 nt, synthetic construct
  source 1..20: mol_type = other RNA
aggtcgggcttgtctcgccc

SEQ ID NO: 1930 - RNA, 20 nt, synthetic construct
  source 1..20: mol_type = other RNA
aggtgacccttccctcccct

SEQ ID NO: 1931 - RNA, 20 nt, synthetic construct
  source 1..20: mol_type = other RNA
aggtgcggtacactgggggg

SEQ ID NO: 1932 - RNA, 20 nt, synthetic construct
  source 1..20: mol_type = other RNA
aggtgggaagccagaaaacg

SEQ ID NO: 1933 - RNA, 20 nt, synthetic construct
  source 1..20: mol_type = other RNA
aggtgggggtggggggcaga

SEQ ID NO: 1934 - RNA, 20 nt, synthetic construct
  source 1..20: mol_type = other RNA
aggtggggtgtagagatgct

SEQ ID NO: 1935 - RNA, 20 nt, synthetic construct
  source 1..20: mol_type = other RNA
aggtgtcgaagacaagcagg

SEQ ID NO: 1936 - RNA, 20 nt, synthetic construct
  source 1..20: mol_type = other RNA
aggttcggtctcttttctgt

SEQ ID NO: 1937 - RNA, 20 nt, synthetic construct
  source 1..20: mol_type = other RNA
agtaaaacgacacaatctgg

SEQ ID NO: 1938 - RNA, 20 nt, synthetic construct
  source 1..20: mol_type = other RNA
agtaaagctcctgtcagtta

SEQ ID NO: 1939 - RNA, 20 nt, synthetic construct
  source 1..20: mol_type = other RNA
agtacgcagccgcttagcga

SEQ ID NO: 1940 - RNA, 20 nt, synthetic construct
  source 1..20: mol_type = other RNA
agtagcaagggcccggtccc

SEQ ID NO: 1941 - RNA, 20 nt, synthetic construct
  source 1..20: mol_type = other RNA
agtaggcagttcccaggaaa

SEQ ID NO: 1942 - RNA, 20 nt, synthetic construct
  source 1..20: mol_type = other RNA
agtaggtaaatcgcatgaga

SEQ ID NO: 1943 - RNA, 20 nt, synthetic construct
  source 1..20: mol_type = other RNA
agtagtgccggcccccctct

SEQ ID NO: 1944 - RNA, 20 nt, synthetic construct
  source 1..20: mol_type = other RNA
agtatgcctgtgtatttcga

SEQ ID NO: 1945 - RNA, 20 nt, synthetic construct
  source 1..20: mol_type = other RNA
agtcccgccagtccgccaac

SEQ ID NO: 1946 - RNA, 20 nt, synthetic construct
  source 1..20: mol_type = other RNA
agtccgccaacacagtagtg

SEQ ID NO: 1947 - RNA, 20 nt, synthetic construct
  source 1..20: mol_type = other RNA
agtcctgccgcctcccggga

SEQ ID NO: 1948 - RNA, 20 nt, synthetic construct
  source 1..20: mol_type = other RNA
agtccttgcttgtctcactt

SEQ ID NO: 1949 - RNA, 20 nt, synthetic construct
  source 1..20: mol_type = other RNA
agtcgctaagcggctgcgta

SEQ ID NO: 1950 - RNA, 20 nt, synthetic construct
  source 1..20: mol_type = other RNA
agtcgggaacataatgtttg

SEQ ID NO: 1951 - RNA, 20 nt, synthetic construct
  source 1..20: mol_type = other RNA
agtcgggaatgtgaagagga

SEQ ID NO: 1952 - RNA, 20 nt, synthetic construct
  source 1..20: mol_type = other RNA
agtcggtttacccgccgcct

SEQ ID NO: 1953 - RNA, 20 nt, synthetic construct
  source 1..20: mol_type = other RNA
agtctcacatgagcgaaacc

SEQ ID NO: 1954 - RNA, 20 nt, synthetic construct
  source 1..20: mol_type = other RNA
agtctctgagcgcaggcggg

SEQ ID NO: 1955 - RNA, 20 nt, synthetic construct
  source 1..20: mol_type = other RNA
agtgaaatcggctctggcgc

SEQ ID NO: 1956 - RNA, 20 nt, synthetic construct
  source 1..20: mol_type = other RNA
agtgagacaagcaaggactc

SEQ ID NO: 1957 - RNA, 20 nt, synthetic construct
  source 1..20: mol_type = other RNA
agtgccggcccccctctttc

SEQ ID NO: 1958 - RNA, 20 nt, synthetic construct
  source 1..20: mol_type = other RNA
agtgcctgtagcaggtcggg

SEQ ID NO: 1959 - RNA, 20 nt, synthetic construct
  source 1..20: mol_type = other RNA
agtggcagcatcctcctaag

SEQ ID NO: 1960 - RNA, 20 nt, synthetic construct
  source 1..20: mol_type = other RNA
agtggcgtttccgctcgggc

SEQ ID NO: 1961 - RNA, 20 nt, synthetic construct
  source 1..20: mol_type = other RNA
agtgggccaatgggtgcggg

SEQ ID NO: 1962 - RNA, 20 nt, synthetic construct
  source 1..20: mol_type = other RNA
agtggtctttctcttggata

SEQ ID NO: 1963 - RNA, 20 nt, synthetic construct
  source 1..20: mol_type = other RNA
agtggtttcgctcatgtgag

SEQ ID NO: 1964 - RNA, 20 nt, synthetic construct
  source 1..20: mol_type = other RNA
agtgtaccgcacctcccctc

SEQ ID NO: 1965 - RNA, 20 nt, synthetic construct
  source 1..20: mol_type = other RNA
agtgtaggaaagagccctgg

SEQ ID NO: 1966 - RNA, 20 nt, synthetic construct
  source 1..20: mol_type = other RNA
agtgtctggccccgcgcccc

SEQ ID NO: 1967 - RNA, 20 nt, synthetic construct
  source 1..20: mol_type = other RNA
agttaaactgttgggaaagc

SEQ ID NO: 1968 - RNA, 20 nt, synthetic construct
  source 1..20: mol_type = other RNA
agttacgccgtcgggagtac

SEQ ID NO: 1969 - RNA, 20 nt, synthetic construct
  source 1..20: mol_type = other RNA
agttaggcccaacgcggcgc

SEQ ID NO: 1970 - RNA, 20 nt, synthetic construct
  source 1..20: mol_type = other RNA
agttcccaggaaagggggtg

SEQ ID NO: 1971 - RNA, 20 nt, synthetic construct
  source 1..20: mol_type = other RNA
agttccgctcccctacctag

SEQ ID NO: 1972 - RNA, 20 nt, synthetic construct
  source 1..20: mol_type = other RNA
agttgagccagattgtgtcg

SEQ ID NO: 1973 - RNA, 20 nt, synthetic construct
  source 1..20: mol_type = other RNA
agttgggtcgcctagattag

SEQ ID NO: 1974 - RNA, 20 nt, synthetic construct
  source 1..20: mol_type = other RNA
agttgtctgtcacaaggccg

SEQ ID NO: 1975 - RNA, 20 nt, synthetic construct
  source 1..20: mol_type = other RNA
agtttaactttccctctcat

SEQ ID NO: 1976 - RNA, 20 nt, synthetic construct
  source 1..20: mol_type = other RNA
ataaagggaatatttttctg

SEQ ID NO: 1977 - RNA, 20 nt, synthetic construct
  source 1..20: mol_type = other RNA
ataatgtttgttacgttggg

SEQ ID NO: 1978 - RNA, 20 nt, synthetic construct
  source 1..20: mol_type = other RNA
atacgccatttgtgttttca

SEQ ID NO: 1979 - RNA, 20 nt, synthetic construct
  source 1..20: mol_type = other RNA
atagaaggggctttcccaac

SEQ ID NO: 1980 - RNA, 20 nt, synthetic construct
  source 1..20: mol_type = other RNA
atagaatcaattagcataga

SEQ ID NO: 1981 - RNA, 20 nt, synthetic construct
  source 1..20: mol_type = other RNA
atagagtccttgcttgtctc

SEQ ID NO: 1982 - RNA, 20 nt, synthetic construct
  source 1..20: mol_type = other RNA
atagcctcgttgaatgtgta

SEQ ID NO: 1983 - RNA, 20 nt, synthetic construct
  source 1..20: mol_type = other RNA
atatccaagagaaagaccac

SEQ ID NO: 1984 - RNA, 20 nt, synthetic construct
  source 1..20: mol_type = other RNA
atatcttcaaaggcagaaaa

SEQ ID NO: 1985 - RNA, 20 nt, synthetic construct
  source 1..20: mol_type = other RNA
atattccctttatgaattct

SEQ ID NO: 1986 - RNA, 20 nt, synthetic construct
  source 1..20: mol_type = other RNA
atattctcacaagatcgttc

SEQ ID NO: 1987 - RNA, 20 nt, synthetic construct
  source 1..20: mol_type = other RNA
atatttttctgcctttgaag

SEQ ID NO: 1988 - RNA, 20 nt, synthetic construct
  source 1..20: mol_type = other RNA
atcaattagcatagaagggg

SEQ ID NO: 1989 - RNA, 20 nt, synthetic construct
  source 1..20: mol_type = other RNA
atcagagttgtctgtcacaa

SEQ ID NO: 1990 - RNA, 20 nt, synthetic construct
  source 1..20: mol_type = other RNA
atcagcggaagccgccgggg

SEQ ID NO: 1991 - RNA, 20 nt, synthetic construct
  source 1..20: mol_type = other RNA
atcaggtgtcgaagacaagc

SEQ ID NO: 1992 - RNA, 20 nt, synthetic construct
  source 1..20: mol_type = other RNA
atccaagagaaagaccactg

SEQ ID NO: 1993 - RNA, 20 nt, synthetic construct
  source 1..20: mol_type = other RNA
atccagaagtctcggccggc

SEQ ID NO: 1994 - RNA, 20 nt, synthetic construct
  source 1..20: mol_type = other RNA
atccagccacccctttccct

SEQ ID NO: 1995 - RNA, 20 nt, synthetic construct
  source 1..20: mol_type = other RNA
atccatatccaagagaaaga

SEQ ID NO: 1996 - RNA, 20 nt, synthetic construct
  source 1..20: mol_type = other RNA
atcccccactccctaccccc

SEQ ID NO: 1997 - RNA, 20 nt, synthetic construct
  source 1..20: mol_type = other RNA
atccccccagtgtaccgcac

SEQ ID NO: 1998 - RNA, 20 nt, synthetic construct
  source 1..20: mol_type = other RNA
atccccctctaatctaggcg

SEQ ID NO: 1999 - RNA, 20 nt, synthetic construct
  source 1..20: mol_type = other RNA
atccccgtgcggtcagtggc

SEQ ID NO: 2000 - RNA, 20 nt, synthetic construct
  source 1..20: mol_type = other RNA
atcctcctaagagcttgggg

SEQ ID NO: 2001 - RNA, 20 nt, synthetic construct
  source 1..20: mol_type = other RNA
atcgcatgagagggaaagtt

SEQ ID NO: 2002 - RNA, 20 nt, synthetic construct
  source 1..20: mol_type = other RNA
atcgcggcccccagagcgat

SEQ ID NO: 2003 - RNA, 20 nt, synthetic construct
  source 1..20: mol_type = other RNA
atcgctctgggggccgcgat

SEQ ID NO: 2004 - RNA, 20 nt, synthetic construct
  source 1..20: mol_type = other RNA
atcggcgacaagaggctagc

SEQ ID NO: 2005 - RNA, 20 nt, synthetic construct
  source 1..20: mol_type = other RNA
atcggctctggcgcgggcgt

SEQ ID NO: 2006 - RNA, 20 nt, synthetic construct
  source 1..20: mol_type = other RNA
atcgggccccaggggaggga

SEQ ID NO: 2007 - RNA, 20 nt, synthetic construct
  source 1..20: mol_type = other RNA
atcgtgaggttcggtctctt

SEQ ID NO: 2008 - RNA, 20 nt, synthetic construct
  source 1..20: mol_type = other RNA
atcgttctccacgcccaagg

SEQ ID NO: 2009 - RNA, 20 nt, synthetic construct
  source 1..20: mol_type = other RNA
atctaggcgacccaactccc

SEQ ID NO: 2010 - RNA, 20 nt, synthetic construct
  source 1..20: mol_type = other RNA
atctcagacacgctgtggca

SEQ ID NO: 2011 - RNA, 20 nt, synthetic construct
  source 1..20: mol_type = other RNA
atctcccctccgtaatcttc

SEQ ID NO: 2012 - RNA, 20 nt, synthetic construct
  source 1..20: mol_type = other RNA
atctctacaccccacctacc

SEQ ID NO: 2013 - RNA, 20 nt, synthetic construct
  source 1..20: mol_type = other RNA
atctctctccctgggaaaat

SEQ ID NO: 2014 - RNA, 20 nt, synthetic construct
  source 1..20: mol_type = other RNA
atctgaggtgggaagccaga

SEQ ID NO: 2015 - RNA, 20 nt, synthetic construct
  source 1..20: mol_type = other RNA
atctggctcaactccaggct

SEQ ID NO: 2016 - RNA, 20 nt, synthetic construct
  source 1..20: mol_type = other RNA
atcttcaaaggcagaaaaat

SEQ ID NO: 2017 - RNA, 20 nt, synthetic construct
  source 1..20: mol_type = other RNA
atcttcctggacgccttccc

SEQ ID NO: 2018 - RNA, 20 nt, synthetic construct
  source 1..20: mol_type = other RNA
atcttgtgagaatatcttca

SEQ ID NO: 2019 - RNA, 20 nt, synthetic construct
  source 1..20: mol_type = other RNA
atgaaagggggagttgggtc

SEQ ID NO: 2020 - RNA, 20 nt, synthetic construct
  source 1..20: mol_type = other RNA
atgaattctctttccctctg

SEQ ID NO: 2021 - RNA, 20 nt, synthetic construct
  source 1..20: mol_type = other RNA
atgagagggaaagttaaact

SEQ ID NO: 2022 - RNA, 20 nt, synthetic construct
  source 1..20: mol_type = other RNA
atgagcgaaaccactgcgcg

SEQ ID NO: 2023 - RNA, 20 nt, synthetic construct
  source 1..20: mol_type = other RNA
atgcaggcgggagggaggcc

SEQ ID NO: 2024 - RNA, 20 nt, synthetic construct
  source 1..20: mol_type = other RNA
atgcctgtgtatttcgagcg

SEQ ID NO: 2025 - RNA, 20 nt, synthetic construct
  source 1..20: mol_type = other RNA
atgcctttgggaagcagcca

SEQ ID NO: 2026 - RNA, 20 nt, synthetic construct
  source 1..20: mol_type = other RNA
atgcgatttacctacttgaa

SEQ ID NO: 2027 - RNA, 20 nt, synthetic construct
  source 1..20: mol_type = other RNA
atgctaattgattctataga

SEQ ID NO: 2028 - RNA, 20 nt, synthetic construct
  source 1..20: mol_type = other RNA
atgctcgaaaccggacggag

SEQ ID NO: 2029 - RNA, 20 nt, synthetic construct
  source 1..20: mol_type = other RNA
atgctgccacttctcacccc

SEQ ID NO: 2030 - RNA, 20 nt, synthetic construct
  source 1..20: mol_type = other RNA
atgctgggtgtgcgggcgcg

SEQ ID NO: 2031 - RNA, 20 nt, synthetic construct
  source 1..20: mol_type = other RNA
atggcccgtacccgtgaggt

SEQ ID NO: 2032 - RNA, 20 nt, synthetic construct
  source 1..20: mol_type = other RNA
atggcgtattctggttggag

SEQ ID NO: 2033 - RNA, 20 nt, synthetic construct
  source 1..20: mol_type = other RNA
atggctccgtccggtttcga

SEQ ID NO: 2034 - RNA, 20 nt, synthetic construct
  source 1..20: mol_type = other RNA
atggctgcttcccaaaggca

SEQ ID NO: 2035 - RNA, 20 nt, synthetic construct
  source 1..20: mol_type = other RNA
atggggtgttgcaacggtgt

SEQ ID NO: 2036 - RNA, 20 nt, synthetic construct
  source 1..20: mol_type = other RNA
atgggtgcggggcggtgggc

SEQ ID NO: 2037 - RNA, 20 nt, synthetic construct
  source 1..20: mol_type = other RNA
atgggtggctaggggggccg

SEQ ID NO: 2038 - RNA, 20 nt, synthetic construct
  source 1..20: mol_type = other RNA
atgtgaagaggagtgtagga

SEQ ID NO: 2039 - RNA, 20 nt, synthetic construct
  source 1..20: mol_type = other RNA
atgtgagactcgagccagta

SEQ ID NO: 2040 - RNA, 20 nt, synthetic construct
  source 1..20: mol_type = other RNA
atgtgtagggttcgagcctg

SEQ ID NO: 2041 - RNA, 20 nt, synthetic construct
  source 1..20: mol_type = other RNA
atgttcccgacttcccacgg

SEQ ID NO: 2042 - RNA, 20 nt, synthetic construct
  source 1..20: mol_type = other RNA
atgtttgttacgttgggagg

SEQ ID NO: 2043 - RNA, 20 nt, synthetic construct
  source 1..20: mol_type = other RNA
atgtttttcctgggtcagga

SEQ ID NO: 2044 - RNA, 20 nt, synthetic construct
  source 1..20: mol_type = other RNA
attaccttcgccacccccac

SEQ ID NO: 2045 - RNA, 20 nt, synthetic construct
  source 1..20: mol_type = other RNA
attacggaggggagatcgcg

SEQ ID NO: 2046 - RNA, 20 nt, synthetic construct
  source 1..20: mol_type = other RNA
attagagggggatctctctc

SEQ ID NO: 2047 - RNA, 20 nt, synthetic construct
  source 1..20: mol_type = other RNA
attagcatagaaggggcttt

SEQ ID NO: 2048 - RNA, 20 nt, synthetic construct
  source 1..20: mol_type = other RNA
attatgttcccgacttccca

SEQ ID NO: 2049 - RNA, 20 nt, synthetic construct
  source 1..20: mol_type = other RNA
attcaacgaggctatctcag

SEQ ID NO: 2050 - RNA, 20 nt, synthetic construct
  source 1..20: mol_type = other RNA
attcataaagggaatatttt

SEQ ID NO: 2051 - RNA, 20 nt, synthetic construct
  source 1..20: mol_type = other RNA
attcccagcgccggcgccag

SEQ ID NO: 2052 - RNA, 20 nt, synthetic construct
  source 1..20: mol_type = other RNA
attcccgacttacacgcaga

SEQ ID NO: 2053 - RNA, 20 nt, synthetic construct
  source 1..20: mol_type = other RNA
attcccggccaggaaacgcc

SEQ ID NO: 2054 - RNA, 20 nt, synthetic construct
  source 1..20: mol_type = other RNA
attccctttatgaattctct

SEQ ID NO: 2055 - RNA, 20 nt, synthetic construct
  source 1..20: mol_type = other RNA
attctatagagtccttgctt

SEQ ID NO: 2056 - RNA, 20 nt, synthetic construct
  source 1..20: mol_type = other RNA
attctcacaagatcgttctc

SEQ ID NO: 2057 - RNA, 20 nt, synthetic construct
  source 1..20: mol_type = other RNA
attctctttccctctgcgtg

SEQ ID NO: 2058 - RNA, 20 nt, synthetic construct
  source 1..20: mol_type = other RNA
attctggttggagtaaagct

SEQ ID NO: 2059 - RNA, 20 nt, synthetic construct
  source 1..20: mol_type = other RNA
attgattctatagagtcctt

SEQ ID NO: 2060 - RNA, 20 nt, synthetic construct
  source 1..20: mol_type = other RNA
attgctctcgcagagggagg

SEQ ID NO: 2061 - RNA, 20 nt, synthetic construct
  source 1..20: mol_type = other RNA
attggcccactcgccgccaa

SEQ ID NO: 2062 - RNA, 20 nt, synthetic construct
  source 1..20: mol_type = other RNA
attggccgtttctcctcccg

SEQ ID NO: 2063 - RNA, 20 nt, synthetic construct
  source 1..20: mol_type = other RNA
attggcctctccgcccaccg

SEQ ID NO: 2064 - RNA, 20 nt, synthetic construct
  source 1..20: mol_type = other RNA
attggcggcgagtgggccaa

SEQ ID NO: 2065 - RNA, 20 nt, synthetic construct
  source 1..20: mol_type = other RNA
attggctgtcgaagctgtgg

SEQ ID NO: 2066 - RNA, 20 nt, synthetic construct
  source 1..20: mol_type = other RNA
attgtgtcgttttacttgcc

SEQ ID NO: 2067 - RNA, 20 nt, synthetic construct
  source 1..20: mol_type = other RNA
atttacctacttgaaccagg

SEQ ID NO: 2068 - RNA, 20 nt, synthetic construct
  source 1..20: mol_type = other RNA
atttcactgaccctcccctc

SEQ ID NO: 2069 - RNA, 20 nt, synthetic construct
  source 1..20: mol_type = other RNA
atttcgagcggagggcagca

SEQ ID NO: 2070 - RNA, 20 nt, synthetic construct
  source 1..20: mol_type = other RNA
atttgtgttttcacacacgg

SEQ ID NO: 2071 - RNA, 20 nt, synthetic construct
  source 1..20: mol_type = other RNA
attttcccagggagagagat

SEQ ID NO: 2072 - RNA, 20 nt, synthetic construct
  source 1..20: mol_type = other RNA
attttccgctcccttctccc

SEQ ID NO: 2073 - RNA, 20 nt, synthetic construct
  source 1..20: mol_type = other RNA
atttttctgcctttgaagat

SEQ ID NO: 2074 - RNA, 20 nt, synthetic construct
  source 1..20: mol_type = other RNA
caaacattatgttcccgact

SEQ ID NO: 2075 - RNA, 20 nt, synthetic construct
  source 1..20: mol_type = other RNA
caaaggcagaaaaatattcc

SEQ ID NO: 2076 - RNA, 20 nt, synthetic construct
  source 1..20: mol_type = other RNA
caaaggcattaccttcgcca

SEQ ID NO: 2077 - RNA, 20 nt, synthetic construct
  source 1..20: mol_type = other RNA
caaatggcgtattctggttg

SEQ ID NO: 2078 - RNA, 20 nt, synthetic construct
  source 1..20: mol_type = other RNA
caacacagtagtgccggccc

SEQ ID NO: 2079 - RNA, 20 nt, synthetic construct
  source 1..20: mol_type = other RNA
caacaccccattttcccagg

SEQ ID NO: 2080 - RNA, 20 nt, synthetic construct
  source 1..20: mol_type = other RNA
caacagtttaactttccctc

SEQ ID NO: 2081 - RNA, 20 nt, synthetic construct
  source 1..20: mol_type = other RNA
caaccagaatacgccatttg

SEQ ID NO: 2082 - RNA, 20 nt, synthetic construct
  source 1..20: mol_type = other RNA
caacccccgcaagccaccag

SEQ ID NO: 2083 - RNA, 20 nt, synthetic construct
  source 1..20: mol_type = other RNA
caaccggagggggagggaga

SEQ ID NO: 2084 - RNA, 20 nt, synthetic construct
  source 1..20: mol_type = other RNA
caacgaggctatctcagaca

SEQ ID NO: 2085 - RNA, 20 nt, synthetic construct
  source 1..20: mol_type = other RNA
caacgcctcttcaccccctt

SEQ ID NO: 2086 - RNA, 20 nt, synthetic construct
  source 1..20: mol_type = other RNA
caacgcgagagtcgctaagc

SEQ ID NO: 2087 - RNA, 20 nt, synthetic construct
  source 1..20: mol_type = other RNA
caacgcggcgccacggcgtt

SEQ ID NO: 2088 - RNA, 20 nt, synthetic construct
  source 1..20: mol_type = other RNA
caacggtgtgtgcaaggcgg

SEQ ID NO: 2089 - RNA, 20 nt, synthetic construct
  source 1..20: mol_type = other RNA
caacgtaacaaacattatgt

SEQ ID NO: 2090 - RNA, 20 nt, synthetic construct
  source 1..20: mol_type = other RNA
caacgtggcaggaagcgcgc

SEQ ID NO: 2091 - RNA, 20 nt, synthetic construct
  source 1..20: mol_type = other RNA
caactccaggctcgaaccct

SEQ ID NO: 2092 - RNA, 20 nt, synthetic construct
  source 1..20: mol_type = other RNA
caactccccctttcatgttt

SEQ ID NO: 2093 - RNA, 20 nt, synthetic construct
  source 1..20: mol_type = other RNA
caactctgatcgctctgggg

SEQ ID NO: 2094 - RNA, 20 nt, synthetic construct
  source 1..20: mol_type = other RNA
caagaagtgagacaagcaag

SEQ ID NO: 2095 - RNA, 20 nt, synthetic construct
  source 1..20: mol_type = other RNA
caagagaaagaccactgacg

SEQ ID NO: 2096 - RNA, 20 nt, synthetic construct
  source 1..20: mol_type = other RNA
caagaggcctctcctcaagg

SEQ ID NO: 2097 - RNA, 20 nt, synthetic construct
  source 1..20: mol_type = other RNA
caagaggctagccggaagcg

SEQ ID NO: 2098 - RNA, 20 nt, synthetic construct
  source 1..20: mol_type = other RNA
caagatcgttctccacgccc

SEQ ID NO: 2099 - RNA, 20 nt, synthetic construct
  source 1..20: mol_type = other RNA
caagcaaggactctatagaa

SEQ ID NO: 2100 - RNA, 20 nt, synthetic construct
  source 1..20: mol_type = other RNA
caagcaggcggcgggtaaac

SEQ ID NO: 2101 - RNA, 20 nt, synthetic construct
  source 1..20: mol_type = other RNA
caagccaccagacggccccc

SEQ ID NO: 2102 - RNA, 20 nt, synthetic construct
  source 1..20: mol_type = other RNA
caagcccgacctgctacagg

SEQ ID NO: 2103 - RNA, 20 nt, synthetic construct
  source 1..20: mol_type = other RNA
caagctcttaggaggatgct

SEQ ID NO: 2104 - RNA, 20 nt, synthetic construct
  source 1..20: mol_type = other RNA
caaggactctatagaatcaa

SEQ ID NO: 2105 - RNA, 20 nt, synthetic construct
  source 1..20: mol_type = other RNA
caaggagagcgagcgcgggg

SEQ ID NO: 2106 - RNA, 20 nt, synthetic construct
  source 1..20: mol_type = other RNA
caaggcaagtaaaacgacac

SEQ ID NO: 2107 - RNA, 20 nt, synthetic construct
  source 1..20: mol_type = other RNA
caaggccgcgagaacggggg

SEQ ID NO: 2108 - RNA, 20 nt, synthetic construct
  source 1..20: mol_type = other RNA
caaggcggcgaggggggtga

SEQ ID NO: 2109 - RNA, 20 nt, synthetic construct
  source 1..20: mol_type = other RNA
caagggaaaggtaaacgtgg

SEQ ID NO: 2110 - RNA, 20 nt, synthetic construct
  source 1..20: mol_type = other RNA
caagggcccggtcccacagc

SEQ ID NO: 2111 - RNA, 20 nt, synthetic construct
  source 1..20: mol_type = other RNA
caaggtaagggtccgacaga

SEQ ID NO: 2112 - RNA, 20 nt, synthetic construct
  source 1..20: mol_type = other RNA
caagtaaaacgacacaatct

SEQ ID NO: 2113 - RNA, 20 nt, synthetic construct
  source 1..20: mol_type = other RNA
caagtaggtaaatcgcatga

SEQ ID NO: 2114 - RNA, 20 nt, synthetic construct
  source 1..20: mol_type = other RNA
caatcagcggaagccgccgg

SEQ ID NO: 2115 - RNA, 20 nt, synthetic construct
  source 1..20: mol_type = other RNA
caatcaggtgtcgaagacaa

SEQ ID NO: 2116 - RNA, 20 nt, synthetic construct
  source 1..20: mol_type = other RNA
caatcggcgacaagaggcta

SEQ ID NO: 2117 - RNA, 20 nt, synthetic construct
  source 1..20: mol_type = other RNA
caatctggctcaactccagg

SEQ ID NO: 2118 - RNA, 20 nt, synthetic construct
  source 1..20: mol_type = other RNA
caatggcgcggcgggagggg

SEQ ID NO: 2119 - RNA, 20 nt, synthetic construct
  source 1..20: mol_type = other RNA
caatggctccgtccggtttc

SEQ ID NO: 2120 - RNA, 20 nt, synthetic construct
  source 1..20: mol_type = other RNA
caatgggtgcggggcggtgg

SEQ ID NO: 2121 - RNA, 20 nt, synthetic construct
  source 1..20: mol_type = other RNA
caattagcatagaaggggct

SEQ ID NO: 2122 - RNA, 20 nt, synthetic construct
  source 1..20: mol_type = other RNA
cacaaatggcgtattctggt

SEQ ID NO: 2123 - RNA, 20 nt, synthetic construct
  source 1..20: mol_type = other RNA
cacaagatcgttctccacgc

SEQ ID NO: 2124 - RNA, 20 nt, synthetic construct
  source 1..20: mol_type = other RNA
cacaaggccgcgagaacggg

SEQ ID NO: 2125 - RNA, 20 nt, synthetic construct
  source 1..20: mol_type = other RNA
cacaatctggctcaactcca

SEQ ID NO: 2126 - RNA, 20 nt, synthetic construct
  source 1..20: mol_type = other RNA
cacacaccgttgcaacaccc

SEQ ID NO: 2127 - RNA, 20 nt, synthetic construct
  source 1..20: mol_type = other RNA
cacacacggcgggaggagaa

SEQ ID NO: 2128 - RNA, 20 nt, synthetic construct
  source 1..20: mol_type = other RNA
cacacccagcatctctacac

SEQ ID NO: 2129 - RNA, 20 nt, synthetic construct
  source 1..20: mol_type = other RNA
cacaccgttgcaacacccca

SEQ ID NO: 2130 - RNA, 20 nt, synthetic construct
  source 1..20: mol_type = other RNA
cacacgccacggggagccag

SEQ ID NO: 2131 - RNA, 20 nt, synthetic construct
  source 1..20: mol_type = other RNA
cacacggcgggaggagaaac

SEQ ID NO: 2132 - RNA, 20 nt, synthetic construct
  source 1..20: mol_type = other RNA
cacacgttctctggctcccc

SEQ ID NO: 2133 - RNA, 20 nt, synthetic construct
  source 1..20: mol_type = other RNA
cacagcctcttctctaggcg

SEQ ID NO: 2134 - RNA, 20 nt, synthetic construct
  source 1..20: mol_type = other RNA
cacagcgtgtctgagatagc

SEQ ID NO: 2135 - RNA, 20 nt, synthetic construct
  source 1..20: mol_type = other RNA
cacagcttcgacagccaatc

SEQ ID NO: 2136 - RNA, 20 nt, synthetic construct
  source 1..20: mol_type = other RNA
cacagtagtgccggcccccc

SEQ ID NO: 2137 - RNA, 20 nt, synthetic construct
  source 1..20: mol_type = other RNA
cacatgagcgaaaccactgc

SEQ ID NO: 2138 - RNA, 20 nt, synthetic construct
  source 1..20: mol_type = other RNA
cacattcaacgaggctatct

SEQ ID NO: 2139 - RNA, 20 nt, synthetic construct
  source 1..20: mol_type = other RNA
cacattcccgacttacacgc

SEQ ID NO: 2140 - RNA, 20 nt, synthetic construct
  source 1..20: mol_type = other RNA
caccacacgttctctggctc

SEQ ID NO: 2141 - RNA, 20 nt, synthetic construct
  source 1..20: mol_type = other RNA
caccagacggcccccctagc

SEQ ID NO: 2142 - RNA, 20 nt, synthetic construct
  source 1..20: mol_type = other RNA
caccagagttccgctcccct

SEQ ID NO: 2143 - RNA, 20 nt, synthetic construct
  source 1..20: mol_type = other RNA
cacccagcatctctacaccc

SEQ ID NO: 2144 - RNA, 20 nt, synthetic construct
  source 1..20: mol_type = other RNA
cacccagggggcaacgcgag

SEQ ID NO: 2145 - RNA, 20 nt, synthetic construct
  source 1..20: mol_type = other RNA
cacccatccccccagtgtac

SEQ ID NO: 2146 - RNA, 20 nt, synthetic construct
  source 1..20: mol_type = other RNA
cacccattggcccactcgcc

SEQ ID NO: 2147 - RNA, 20 nt, synthetic construct
  source 1..20: mol_type = other RNA
caccccacctacctacccgc

SEQ ID NO: 2148 - RNA, 20 nt, synthetic construct
  source 1..20: mol_type = other RNA
caccccattttcccagggag

SEQ ID NO: 2149 - RNA, 20 nt, synthetic construct
  source 1..20: mol_type = other RNA
cacccccaccacacgttctc

SEQ ID NO: 2150 - RNA, 20 nt, synthetic construct
  source 1..20: mol_type = other RNA
cacccccacctcacgggtac

SEQ ID NO: 2151 - RNA, 20 nt, synthetic construct
  source 1..20: mol_type = other RNA
cacccccacgagtgcctgta

SEQ ID NO: 2152 - RNA, 20 nt, synthetic construct
  source 1..20: mol_type = other RNA
cacccccctcgccgccttgc

SEQ ID NO: 2153 - RNA, 20 nt, synthetic construct
  source 1..20: mol_type = other RNA
cacccccgcgccccgcgcag

SEQ ID NO: 2154 - RNA, 20 nt, synthetic construct
  source 1..20: mol_type = other RNA
caccccctttcctgggaact

SEQ ID NO: 2155 - RNA, 20 nt, synthetic construct
  source 1..20: mol_type = other RNA
cacccctttccctcccaacg

SEQ ID NO: 2156 - RNA, 20 nt, synthetic construct
  source 1..20: mol_type = other RNA
caccctccccttccttcggg

SEQ ID NO: 2157 - RNA, 20 nt, synthetic construct
  source 1..20: mol_type = other RNA
caccgccccgcacccattgg

SEQ ID NO: 2158 - RNA, 20 nt, synthetic construct
  source 1..20: mol_type = other RNA
caccgcctgaagggcgagac

SEQ ID NO: 2159 - RNA, 20 nt, synthetic construct
  source 1..20: mol_type = other RNA
caccgttgcaacaccccatt

SEQ ID NO: 2160 - RNA, 20 nt, synthetic construct
  source 1..20: mol_type = other RNA
cacctacctacccgccccac

SEQ ID NO: 2161 - RNA, 20 nt, synthetic construct
  source 1..20: mol_type = other RNA
cacctcacgggtacgggcca

SEQ ID NO: 2162 - RNA, 20 nt, synthetic construct
  source 1..20: mol_type = other RNA
cacctcagatggctgcttcc

SEQ ID NO: 2163 - RNA, 20 nt, synthetic construct
  source 1..20: mol_type = other RNA
cacctcccctcccaccagag

SEQ ID NO: 2164 - RNA, 20 nt, synthetic construct
  source 1..20: mol_type = other RNA
cacctcctccgtctccccgc

SEQ ID NO: 2165 - RNA, 20 nt, synthetic construct
  source 1..20: mol_type = other RNA
cacctgattggctgtcgaag

SEQ ID NO: 2166 - RNA, 20 nt, synthetic construct
  source 1..20: mol_type = other RNA
cacgacccaaggagagcgag

SEQ ID NO: 2167 - RNA, 20 nt, synthetic construct
  source 1..20: mol_type = other RNA
cacgagtgcctgtagcaggt

SEQ ID NO: 2168 - RNA, 20 nt, synthetic construct
  source 1..20: mol_type = other RNA
cacgatcgggccccagggga

SEQ ID NO: 2169 - RNA, 20 nt, synthetic construct
  source 1..20: mol_type = other RNA
cacgcagagggaaagagaat

SEQ ID NO: 2170 - RNA, 20 nt, synthetic construct
  source 1..20: mol_type = other RNA
cacgcagccccagtcccgcc

SEQ ID NO: 2171 - RNA, 20 nt, synthetic construct
  source 1..20: mol_type = other RNA
cacgccacggggagccagag

SEQ ID NO: 2172 - RNA, 20 nt, synthetic construct
  source 1..20: mol_type = other RNA
cacgcccaaggcaagtaaaa

SEQ ID NO: 2173 - RNA, 20 nt, synthetic construct
  source 1..20: mol_type = other RNA
cacgctgtggcacacgccac

SEQ ID NO: 2174 - RNA, 20 nt, synthetic construct
  source 1..20: mol_type = other RNA
cacggcactcccgggaggcg

SEQ ID NO: 2175 - RNA, 20 nt, synthetic construct
  source 1..20: mol_type = other RNA
cacggcgggaggagaaacgg

SEQ ID NO: 2176 - RNA, 20 nt, synthetic construct
  source 1..20: mol_type = other RNA
cacggcgtttcctggccggg

SEQ ID NO: 2177 - RNA, 20 nt, synthetic construct
  source 1..20: mol_type = other RNA
cacgggaaaggcaacccccg

SEQ ID NO: 2178 - RNA, 20 nt, synthetic construct
  source 1..20: mol_type = other RNA
cacggggagccagagaacgt

SEQ ID NO: 2179 - RNA, 20 nt, synthetic construct
  source 1..20: mol_type = other RNA
cacggggattcccagcgccg

SEQ ID NO: 2180 - RNA, 20 nt, synthetic construct
  source 1..20: mol_type = other RNA
cacgggtacgggccattccc

SEQ ID NO: 2181 - RNA, 20 nt, synthetic construct
  source 1..20: mol_type = other RNA
cacgttctctggctccccgt

SEQ ID NO: 2182 - RNA, 20 nt, synthetic construct
  source 1..20: mol_type = other RNA
cacgttgcgcaggggcgcgg

SEQ ID NO: 2183 - RNA, 20 nt, synthetic construct
  source 1..20: mol_type = other RNA
cacgtttacctttcccttga

SEQ ID NO: 2184 - RNA, 20 nt, synthetic construct
  source 1..20: mol_type = other RNA
cactactgtgttggcggact

SEQ ID NO: 2185 - RNA, 20 nt, synthetic construct
  source 1..20: mol_type = other RNA
cactcagcccgctgcccgag

SEQ ID NO: 2186 - RNA, 20 nt, synthetic construct
  source 1..20: mol_type = other RNA
cactcccgggaggcggcagg

SEQ ID NO: 2187 - RNA, 20 nt, synthetic construct
  source 1..20: mol_type = other RNA
cactccctacccccgttctc

SEQ ID NO: 2188 - RNA, 20 nt, synthetic construct
  source 1..20: mol_type = other RNA
cactcctcttcacattcccg

SEQ ID NO: 2189 - RNA, 20 nt, synthetic construct
  source 1..20: mol_type = other RNA
cactcgccgccaatcagcgg

SEQ ID NO: 2190 - RNA, 20 nt, synthetic construct
  source 1..20: mol_type = other RNA
cactcgtgggggtgggggag

SEQ ID NO: 2191 - RNA, 20 nt, synthetic construct
  source 1..20: mol_type = other RNA
cactgaccctcccctcccgc

SEQ ID NO: 2192 - RNA, 20 nt, synthetic construct
  source 1..20: mol_type = other RNA
cactgaccgcacggggattc

SEQ ID NO: 2193 - RNA, 20 nt, synthetic construct
  source 1..20: mol_type = other RNA
cactgacgcccaagaagtga

SEQ ID NO: 2194 - RNA, 20 nt, synthetic construct
  source 1..20: mol_type = other RNA
cactgcggcgctcggcctcg

SEQ ID NO: 2195 - RNA, 20 nt, synthetic construct
  source 1..20: mol_type = other RNA
cactggggggatgggtggct

SEQ ID NO: 2196 - RNA, 20 nt, synthetic construct
  source 1..20: mol_type = other RNA
cacttctcacccccctcgcc

SEQ ID NO: 2197 - RNA, 20 nt, synthetic construct
  source 1..20: mol_type = other RNA
cacttcttgggcgtcagtgg

SEQ ID NO: 2198 - RNA, 20 nt, synthetic construct
  source 1..20: mol_type = other RNA
cagaaaaatattccctttat

SEQ ID NO: 2199 - RNA, 20 nt, synthetic construct
  source 1..20: mol_type = other RNA
cagaaaacgagagggaaggc

SEQ ID NO: 2200 - RNA, 20 nt, synthetic construct
  source 1..20: mol_type = other RNA
cagaaaagagaccgaacctc

SEQ ID NO: 2201 - RNA, 20 nt, synthetic construct
  source 1..20: mol_type = other RNA
cagaaaggcggagcgagcca

SEQ ID NO: 2202 - RNA, 20 nt, synthetic construct
  source 1..20: mol_type = other RNA
cagaagtctcggccggcagc

SEQ ID NO: 2203 - RNA, 20 nt, synthetic construct
  source 1..20: mol_type = other RNA
cagaatacgccatttgtgtt

SEQ ID NO: 2204 - RNA, 20 nt, synthetic construct
  source 1..20: mol_type = other RNA
cagacaactctgatcgctct

SEQ ID NO: 2205 - RNA, 20 nt, synthetic construct
  source 1..20: mol_type = other RNA
cagacacgctgtggcacacg

SEQ ID NO: 2206 - RNA, 20 nt, synthetic construct
  source 1..20: mol_type = other RNA
cagacactgcggcgctcggc

SEQ ID NO: 2207 - RNA, 20 nt, synthetic construct
  source 1..20: mol_type = other RNA
cagacggcccccctagccac

SEQ ID NO: 2208 - RNA, 20 nt, synthetic construct
  source 1..20: mol_type = other RNA
cagagaacgtgtggtggggg

SEQ ID NO: 2209 - RNA, 20 nt, synthetic construct
  source 1..20: mol_type = other RNA
cagagactcacgcagcccca

SEQ ID NO: 2210 - RNA, 20 nt, synthetic construct
  source 1..20: mol_type = other RNA
cagagagcctcggctaggta

SEQ ID NO: 2211 - RNA, 20 nt, synthetic construct
  source 1..20: mol_type = other RNA
cagagccgatttcactgacc

SEQ ID NO: 2212 - RNA, 20 nt, synthetic construct
  source 1..20: mol_type = other RNA
cagagcgatcagagttgtct

SEQ ID NO: 2213 - RNA, 20 nt, synthetic construct
  source 1..20: mol_type = other RNA
cagagggaaagagaattcat

SEQ ID NO: 2214 - RNA, 20 nt, synthetic construct
  source 1..20: mol_type = other RNA
cagagggaggagcgcttccg

SEQ ID NO: 2215 - RNA, 20 nt, synthetic construct
  source 1..20: mol_type = other RNA
cagagttccgctcccctacc

SEQ ID NO: 2216 - RNA, 20 nt, synthetic construct
  source 1..20: mol_type = other RNA
cagagttgtctgtcacaagg

SEQ ID NO: 2217 - RNA, 20 nt, synthetic construct
  source 1..20: mol_type = other RNA
cagatggctgcttcccaaag

SEQ ID NO: 2218 - RNA, 20 nt, synthetic construct
  source 1..20: mol_type = other RNA
cagattgtgtcgttttactt

SEQ ID NO: 2219 - RNA, 20 nt, synthetic construct
  source 1..20: mol_type = other RNA
cagcaagaggcctctcctca

SEQ ID NO: 2220 - RNA, 20 nt, synthetic construct
  source 1..20: mol_type = other RNA
cagcatccatatccaagaga

SEQ ID NO: 2221 - RNA, 20 nt, synthetic construct
  source 1..20: mol_type = other RNA
cagcatcctcctaagagctt

SEQ ID NO: 2222 - RNA, 20 nt, synthetic construct
  source 1..20: mol_type = other RNA
cagcatctctacaccccacc

SEQ ID NO: 2223 - RNA, 20 nt, synthetic construct
  source 1..20: mol_type = other RNA
cagccaatcaggtgtcgaag

SEQ ID NO: 2224 - RNA, 20 nt, synthetic construct
  source 1..20: mol_type = other RNA
cagccacccctttccctccc

SEQ ID NO: 2225 - RNA, 20 nt, synthetic construct
  source 1..20: mol_type = other RNA
cagccatctgaggtgggaag

SEQ ID NO: 2226 - RNA, 20 nt, synthetic construct
  source 1..20: mol_type = other RNA
cagccccagtcccgccagtc

SEQ ID NO: 2227 - RNA, 20 nt, synthetic construct
  source 1..20: mol_type = other RNA
cagcccgctgcccgagcgga

SEQ ID NO: 2228 - RNA, 20 nt, synthetic construct
  source 1..20: mol_type = other RNA
cagccgcttagcgactctcg

SEQ ID NO: 2229 - RNA, 20 nt, synthetic construct
  source 1..20: mol_type = other RNA
cagcctcttctctaggcggc

SEQ ID NO: 2230 - RNA, 20 nt, synthetic construct
  source 1..20: mol_type = other RNA
cagcgcctgggacaaggtaa

SEQ ID NO: 2231 - RNA, 20 nt, synthetic construct
  source 1..20: mol_type = other RNA
cagcgcgcgcttcctgccac

SEQ ID NO: 2232 - RNA, 20 nt, synthetic construct
  source 1..20: mol_type = other RNA
cagcggaagccgccggggcc

SEQ ID NO: 2233 - RNA, 20 nt, synthetic construct
  source 1..20: mol_type = other RNA
cagcgggctgagtgagctgc

SEQ ID NO: 2234 - RNA, 20 nt, synthetic construct
  source 1..20: mol_type = other RNA
cagcgtgtctgagatagcct

SEQ ID NO: 2235 - RNA, 20 nt, synthetic construct
  source 1..20: mol_type = other RNA
cagctcactcagcccgctgc

SEQ ID NO: 2236 - RNA, 20 nt, synthetic construct
  source 1..20: mol_type = other RNA
cagcttcgacagccaatcag

SEQ ID NO: 2237 - RNA, 20 nt, synthetic construct
  source 1..20: mol_type = other RNA
caggaaaaacatgaaagggg

SEQ ID NO: 2238 - RNA, 20 nt, synthetic construct
  source 1..20: mol_type = other RNA
caggaaacgccgtggcgccg

SEQ ID NO: 2239 - RNA, 20 nt, synthetic construct
  source 1..20: mol_type = other RNA
caggaaagggggtgaagagg

SEQ ID NO: 2240 - RNA, 20 nt, synthetic construct
  source 1..20: mol_type = other RNA
caggaagattacggagggga

SEQ ID NO: 2241 - RNA, 20 nt, synthetic construct
  source 1..20: mol_type = other RNA
caggacgcttcccctccccc

SEQ ID NO: 2242 - RNA, 20 nt, synthetic construct
  source 1..20: mol_type = other RNA
caggactcgagttaggccca

SEQ ID NO: 2243 - RNA, 20 nt, synthetic construct
  source 1..20: mol_type = other RNA
caggagctttactccaacca

SEQ ID NO: 2244 - RNA, 20 nt, synthetic construct
  source 1..20: mol_type = other RNA
caggcactcgtgggggtggg

SEQ ID NO: 2245 - RNA, 20 nt, synthetic construct
  source 1..20: mol_type = other RNA
caggcccacgacccaaggag

SEQ ID NO: 2246 - RNA, 20 nt, synthetic construct
  source 1..20: mol_type = other RNA
caggccccggcagcgcctgg

SEQ ID NO: 2247 - RNA, 20 nt, synthetic construct
  source 1..20: mol_type = other RNA
caggcggcgggtaaaccgac

SEQ ID NO: 2248 - RNA, 20 nt, synthetic construct
  source 1..20: mol_type = other RNA
caggctcgaaccctacacat

SEQ ID NO: 2249 - RNA, 20 nt, synthetic construct
  source 1..20: mol_type = other RNA
cagggaaagaggggggccgg

SEQ ID NO: 2250 - RNA, 20 nt, synthetic construct
  source 1..20: mol_type = other RNA
cagggagagagatccccctc

SEQ ID NO: 2251 - RNA, 20 nt, synthetic construct
  source 1..20: mol_type = other RNA
cagggccagggaaagagggg

SEQ ID NO: 2252 - RNA, 20 nt, synthetic construct
  source 1..20: mol_type = other RNA
cagggcgggcctccctcccg

SEQ ID NO: 2253 - RNA, 20 nt, synthetic construct
  source 1..20: mol_type = other RNA
cagggctctttcctacactc

SEQ ID NO: 2254 - RNA, 20 nt, synthetic construct
  source 1..20: mol_type = other RNA
caggggagggaagggtcacc

SEQ ID NO: 2255 - RNA, 20 nt, synthetic construct
  source 1..20: mol_type = other RNA
cagggggcaacgcgagagtc

SEQ ID NO: 2256 - RNA, 20 nt, synthetic construct
  source 1..20: mol_type = other RNA
caggtcgggcttgtctcgcc

SEQ ID NO: 2257 - RNA, 20 nt, synthetic construct
  source 1..20: mol_type = other RNA
caggtgtcgaagacaagcag

SEQ ID NO: 2258 - RNA, 20 nt, synthetic construct
  source 1..20: mol_type = other RNA
cagtagcaagggcccggtcc

SEQ ID NO: 2259 - RNA, 20 nt, synthetic construct
  source 1..20: mol_type = other RNA
cagtagtgccggcccccctc

SEQ ID NO: 2260 - RNA, 20 nt, synthetic construct
  source 1..20: mol_type = other RNA
cagtcccgccagtccgccaa

SEQ ID NO: 2261 - RNA, 20 nt, synthetic construct
  source 1..20: mol_type = other RNA
cagtccgccaacacagtagt

SEQ ID NO: 2262 - RNA, 20 nt, synthetic construct
  source 1..20: mol_type = other RNA
cagtgaaatcggctctggcg

SEQ ID NO: 2263 - RNA, 20 nt, synthetic construct
  source 1..20: mol_type = other RNA
cagtggcgtttccgctcggg

SEQ ID NO: 2264 - RNA, 20 nt, synthetic construct
  source 1..20: mol_type = other RNA
cagtggtctttctcttggat

SEQ ID NO: 2265 - RNA, 20 nt, synthetic construct
  source 1..20: mol_type = other RNA
cagtggtttcgctcatgtga

SEQ ID NO: 2266 - RNA, 20 nt, synthetic construct
  source 1..20: mol_type = other RNA
cagtgtaccgcacctcccct

SEQ ID NO: 2267 - RNA, 20 nt, synthetic construct
  source 1..20: mol_type = other RNA
cagtgtctggccccgcgccc

SEQ ID NO: 2268 - RNA, 20 nt, synthetic construct
  source 1..20: mol_type = other RNA
cagttacgccgtcgggagta

SEQ ID NO: 2269 - RNA, 20 nt, synthetic construct
  source 1..20: mol_type = other RNA
cagttcccaggaaagggggt

SEQ ID NO: 2270 - RNA, 20 nt, synthetic construct
  source 1..20: mol_type = other RNA
cagtttaactttccctctca

SEQ ID NO: 2271 - RNA, 20 nt, synthetic construct
  source 1..20: mol_type = other RNA
cataaagggaatatttttct

SEQ ID NO: 2272 - RNA, 20 nt, synthetic construct
  source 1..20: mol_type = other RNA
cataatgtttgttacgttgg

SEQ ID NO: 2273 - RNA, 20 nt, synthetic construct
  source 1..20: mol_type = other RNA
catagaaggggctttcccaa

SEQ ID NO: 2274 - RNA, 20 nt, synthetic construct
  source 1..20: mol_type = other RNA
catatccaagagaaagacca

SEQ ID NO: 2275 - RNA, 20 nt, synthetic construct
  source 1..20: mol_type = other RNA
catccagaagtctcggccgg

SEQ ID NO: 2276 - RNA, 20 nt, synthetic construct
  source 1..20: mol_type = other RNA
catccagccacccctttccc

SEQ ID NO: 2277 - RNA, 20 nt, synthetic construct
  source 1..20: mol_type = other RNA
catccatatccaagagaaag

SEQ ID NO: 2278 - RNA, 20 nt, synthetic construct
  source 1..20: mol_type = other RNA
catccccccagtgtaccgca

SEQ ID NO: 2279 - RNA, 20 nt, synthetic construct
  source 1..20: mol_type = other RNA
catcctcctaagagcttggg

SEQ ID NO: 2280 - RNA, 20 nt, synthetic construct
  source 1..20: mol_type = other RNA
catctctacaccccacctac

SEQ ID NO: 2281 - RNA, 20 nt, synthetic construct
  source 1..20: mol_type = other RNA
catctgaggtgggaagccag

SEQ ID NO: 2282 - RNA, 20 nt, synthetic construct
  source 1..20: mol_type = other RNA
catgaaagggggagttgggt

SEQ ID NO: 2283 - RNA, 20 nt, synthetic construct
  source 1..20: mol_type = other RNA
catgagagggaaagttaaac

SEQ ID NO: 2284 - RNA, 20 nt, synthetic construct
  source 1..20: mol_type = other RNA
catgagcgaaaccactgcgc

SEQ ID NO: 2285 - RNA, 20 nt, synthetic construct
  source 1..20: mol_type = other RNA
catgcgatttacctacttga

SEQ ID NO: 2286 - RNA, 20 nt, synthetic construct
  source 1..20: mol_type = other RNA
catgtgagactcgagccagt

SEQ ID NO: 2287 - RNA, 20 nt, synthetic construct
  source 1..20: mol_type = other RNA
catgtttttcctgggtcagg

SEQ ID NO: 2288 - RNA, 20 nt, synthetic construct
  source 1..20: mol_type = other RNA
cattaccttcgccaccccca

SEQ ID NO: 2289 - RNA, 20 nt, synthetic construct
  source 1..20: mol_type = other RNA
cattatgttcccgacttccc

SEQ ID NO: 2290 - RNA, 20 nt, synthetic construct
  source 1..20: mol_type = other RNA
cattcaacgaggctatctca

SEQ ID NO: 2291 - RNA, 20 nt, synthetic construct
  source 1..20: mol_type = other RNA
cattcccgacttacacgcag

SEQ ID NO: 2292 - RNA, 20 nt, synthetic construct
  source 1..20: mol_type = other RNA
cattcccggccaggaaacgc

SEQ ID NO: 2293 - RNA, 20 nt, synthetic construct
  source 1..20: mol_type = other RNA
cattgctctcgcagagggag

SEQ ID NO: 2294 - RNA, 20 nt, synthetic construct
  source 1..20: mol_type = other RNA
cattggcccactcgccgcca

SEQ ID NO: 2295 - RNA, 20 nt, synthetic construct
  source 1..20: mol_type = other RNA
cattggcctctccgcccacc

SEQ ID NO: 2296 - RNA, 20 nt, synthetic construct
  source 1..20: mol_type = other RNA
catttgtgttttcacacacg

SEQ ID NO: 2297 - RNA, 20 nt, synthetic construct
  source 1..20: mol_type = other RNA
cattttcccagggagagaga

SEQ ID NO: 2298 - RNA, 20 nt, synthetic construct
  source 1..20: mol_type = other RNA
cattttccgctcccttctcc

SEQ ID NO: 2299 - RNA, 20 nt, synthetic construct
  source 1..20: mol_type = other RNA
ccaaaggcattaccttcgcc

SEQ ID NO: 2300 - RNA, 20 nt, synthetic construct
  source 1..20: mol_type = other RNA
ccaacacagtagtgccggcc

SEQ ID NO: 2301 - RNA, 20 nt, synthetic construct
  source 1..20: mol_type = other RNA
ccaacagtttaactttccct

SEQ ID NO: 2302 - RNA, 20 nt, synthetic construct
  source 1..20: mol_type = other RNA
ccaaccagaatacgccattt

SEQ ID NO: 2303 - RNA, 20 nt, synthetic construct
  source 1..20: mol_type = other RNA
ccaacgcctcttcaccccct

SEQ ID NO: 2304 - RNA, 20 nt, synthetic construct
  source 1..20: mol_type = other RNA
ccaacgcggcgccacggcgt

SEQ ID NO: 2305 - RNA, 20 nt, synthetic construct
  source 1..20: mol_type = other RNA
ccaacgtaacaaacattatg

SEQ ID NO: 2306 - RNA, 20 nt, synthetic construct
  source 1..20: mol_type = other RNA
ccaactccccctttcatgtt

SEQ ID NO: 2307 - RNA, 20 nt, synthetic construct
  source 1..20: mol_type = other RNA
ccaagaagtgagacaagcaa

SEQ ID NO: 2308 - RNA, 20 nt, synthetic construct
  source 1..20: mol_type = other RNA
ccaagagaaagaccactgac

SEQ ID NO: 2309 - RNA, 20 nt, synthetic construct
  source 1..20: mol_type = other RNA
ccaagctcttaggaggatgc

SEQ ID NO: 2310 - RNA, 20 nt, synthetic construct
  source 1..20: mol_type = other RNA
ccaaggagagcgagcgcggg

SEQ ID NO: 2311 - RNA, 20 nt, synthetic construct
  source 1..20: mol_type = other RNA
ccaaggcaagtaaaacgaca

SEQ ID NO: 2312 - RNA, 20 nt, synthetic construct
  source 1..20: mol_type = other RNA
ccaatcagcggaagccgccg

SEQ ID NO: 2313 - RNA, 20 nt, synthetic construct
  source 1..20: mol_type = other RNA
ccaatcaggtgtcgaagaca

SEQ ID NO: 2314 - RNA, 20 nt, synthetic construct
  source 1..20: mol_type = other RNA
ccaatcggcgacaagaggct

SEQ ID NO: 2315 - RNA, 20 nt, synthetic construct
  source 1..20: mol_type = other RNA
ccaatggcgcggcgggaggg

SEQ ID NO: 2316 - RNA, 20 nt, synthetic construct
  source 1..20: mol_type = other RNA
ccaatgggtgcggggcggtg

SEQ ID NO: 2317 - RNA, 20 nt, synthetic construct
  source 1..20: mol_type = other RNA
ccacacgttctctggctccc

SEQ ID NO: 2318 - RNA, 20 nt, synthetic construct
  source 1..20: mol_type = other RNA
ccacagcgtgtctgagatag

SEQ ID NO: 2319 - RNA, 20 nt, synthetic construct
  source 1..20: mol_type = other RNA
ccacagcttcgacagccaat

SEQ ID NO: 2320 - RNA, 20 nt, synthetic construct
  source 1..20: mol_type = other RNA
ccaccacacgttctctggct

SEQ ID NO: 2321 - RNA, 20 nt, synthetic construct
  source 1..20: mol_type = other RNA
ccaccagacggcccccctag

SEQ ID NO: 2322 - RNA, 20 nt, synthetic construct
  source 1..20: mol_type = other RNA
ccaccagagttccgctcccc

SEQ ID NO: 2323 - RNA, 20 nt, synthetic construct
  source 1..20: mol_type = other RNA
ccacccagggggcaacgcga

SEQ ID NO: 2324 - RNA, 20 nt, synthetic construct
  source 1..20: mol_type = other RNA
ccacccatccccccagtgta

SEQ ID NO: 2325 - RNA, 20 nt, synthetic construct
  source 1..20: mol_type = other RNA
ccacccccaccacacgttct

SEQ ID NO: 2326 - RNA, 20 nt, synthetic construct
  source 1..20: mol_type = other RNA
ccacccccacctcacgggta

SEQ ID NO: 2327 - RNA, 20 nt, synthetic construct
  source 1..20: mol_type = other RNA
ccacccccacgagtgcctgt

SEQ ID NO: 2328 - RNA, 20 nt, synthetic construct
  source 1..20: mol_type = other RNA
ccacccccgcgccccgcgca

SEQ ID NO: 2329 - RNA, 20 nt, synthetic construct
  source 1..20: mol_type = other RNA
ccacccctttccctcccaac

SEQ ID NO: 2330 - RNA, 20 nt, synthetic construct
  source 1..20: mol_type = other RNA
ccaccctccccttccttcgg

SEQ ID NO: 2331 - RNA, 20 nt, synthetic construct
  source 1..20: mol_type = other RNA
ccaccgccccgcacccattg

SEQ ID NO: 2332 - RNA, 20 nt, synthetic construct
  source 1..20: mol_type = other RNA
ccaccgcctgaagggcgaga

SEQ ID NO: 2333 - RNA, 20 nt, synthetic construct
  source 1..20: mol_type = other RNA
ccacctacctacccgcccca

SEQ ID NO: 2334 - RNA, 20 nt, synthetic construct
  source 1..20: mol_type = other RNA
ccacctcacgggtacgggcc

SEQ ID NO: 2335 - RNA, 20 nt, synthetic construct
  source 1..20: mol_type = other RNA
ccacctcagatggctgcttc

SEQ ID NO: 2336 - RNA, 20 nt, synthetic construct
  source 1..20: mol_type = other RNA
ccacgacccaaggagagcga

SEQ ID NO: 2337 - RNA, 20 nt, synthetic construct
  source 1..20: mol_type = other RNA
ccacgagtgcctgtagcagg

SEQ ID NO: 2338 - RNA, 20 nt, synthetic construct
  source 1..20: mol_type = other RNA
ccacgcccaaggcaagtaaa

SEQ ID NO: 2339 - RNA, 20 nt, synthetic construct
  source 1..20: mol_type = other RNA
ccacggcgtttcctggccgg

SEQ ID NO: 2340 - RNA, 20 nt, synthetic construct
  source 1..20: mol_type = other RNA
ccacgggaaaggcaaccccc

SEQ ID NO: 2341 - RNA, 20 nt, synthetic construct
  source 1..20: mol_type = other RNA
ccacggggagccagagaacg

SEQ ID NO: 2342 - RNA, 20 nt, synthetic construct
  source 1..20: mol_type = other RNA
ccacgttgcgcaggggcgcg

SEQ ID NO: 2343 - RNA, 20 nt, synthetic construct
  source 1..20: mol_type = other RNA
ccacgtttacctttcccttg

SEQ ID NO: 2344 - RNA, 20 nt, synthetic construct
  source 1..20: mol_type = other RNA
ccactccctacccccgttct

SEQ ID NO: 2345 - RNA, 20 nt, synthetic construct
  source 1..20: mol_type = other RNA
ccactcgccgccaatcagcg

SEQ ID NO: 2346 - RNA, 20 nt, synthetic construct
  source 1..20: mol_type = other RNA
ccactgaccgcacggggatt

SEQ ID NO: 2347 - RNA, 20 nt, synthetic construct
  source 1..20: mol_type = other RNA
ccactgacgcccaagaagtg

SEQ ID NO: 2348 - RNA, 20 nt, synthetic construct
  source 1..20: mol_type = other RNA
ccacttctcacccccctcgc

SEQ ID NO: 2349 - RNA, 20 nt, synthetic construct
  source 1..20: mol_type = other RNA
ccagaaaacgagagggaagg

SEQ ID NO: 2350 - RNA, 20 nt, synthetic construct
  source 1..20: mol_type = other RNA
ccagaagtctcggccggcag

SEQ ID NO: 2351 - RNA, 20 nt, synthetic construct
  source 1..20: mol_type = other RNA
ccagaatacgccatttgtgt

SEQ ID NO: 2352 - RNA, 20 nt, synthetic construct
  source 1..20: mol_type = other RNA
ccagacactgcggcgctcgg

SEQ ID NO: 2353 - RNA, 20 nt, synthetic construct
  source 1..20: mol_type = other RNA
ccagacggcccccctagcca

SEQ ID NO: 2354 - RNA, 20 nt, synthetic construct
  source 1..20: mol_type = other RNA
ccagagaacgtgtggtgggg

SEQ ID NO: 2355 - RNA, 20 nt, synthetic construct
  source 1..20: mol_type = other RNA
ccagagccgatttcactgac

SEQ ID NO: 2356 - RNA, 20 nt, synthetic construct
  source 1..20: mol_type = other RNA
ccagagcgatcagagttgtc

SEQ ID NO: 2357 - RNA, 20 nt, synthetic construct
  source 1..20: mol_type = other RNA
ccagagttccgctcccctac

SEQ ID NO: 2358 - RNA, 20 nt, synthetic construct
  source 1..20: mol_type = other RNA
ccagattgtgtcgttttact

SEQ ID NO: 2359 - RNA, 20 nt, synthetic construct
  source 1..20: mol_type = other RNA
ccagcatctctacaccccac

SEQ ID NO: 2360 - RNA, 20 nt, synthetic construct
  source 1..20: mol_type = other RNA
ccagccacccctttccctcc

SEQ ID NO: 2361 - RNA, 20 nt, synthetic construct
  source 1..20: mol_type = other RNA
ccagcgcgcgcttcctgcca

SEQ ID NO: 2362 - RNA, 20 nt, synthetic construct
  source 1..20: mol_type = other RNA
ccaggaaaaacatgaaaggg

SEQ ID NO: 2363 - RNA, 20 nt, synthetic construct
  source 1..20: mol_type = other RNA
ccaggaaacgccgtggcgcc

SEQ ID NO: 2364 - RNA, 20 nt, synthetic construct
  source 1..20: mol_type = other RNA
ccaggaaagggggtgaagag

SEQ ID NO: 2365 - RNA, 20 nt, synthetic construct
  source 1..20: mol_type = other RNA
ccaggaagattacggagggg

SEQ ID NO: 2366 - RNA, 20 nt, synthetic construct
  source 1..20: mol_type = other RNA
ccaggcccacgacccaagga

SEQ ID NO: 2367 - RNA, 20 nt, synthetic construct
  source 1..20: mol_type = other RNA
ccaggccccggcagcgcctg

SEQ ID NO: 2368 - RNA, 20 nt, synthetic construct
  source 1..20: mol_type = other RNA
ccaggctcgaaccctacaca

SEQ ID NO: 2369 - RNA, 20 nt, synthetic construct
  source 1..20: mol_type = other RNA
ccagggaaagaggggggccg

SEQ ID NO: 2370 - RNA, 20 nt, synthetic construct
  source 1..20: mol_type = other RNA
ccagggagagagatccccct

SEQ ID NO: 2371 - RNA, 20 nt, synthetic construct
  source 1..20: mol_type = other RNA
ccagggctctttcctacact

SEQ ID NO: 2372 - RNA, 20 nt, synthetic construct
  source 1..20: mol_type = other RNA
ccaggggagggaagggtcac

SEQ ID NO: 2373 - RNA, 20 nt, synthetic construct
  source 1..20: mol_type = other RNA
ccagggggcaacgcgagagt

SEQ ID NO: 2374 - RNA, 20 nt, synthetic construct
  source 1..20: mol_type = other RNA
ccagtagcaagggcccggtc

SEQ ID NO: 2375 - RNA, 20 nt, synthetic construct
  source 1..20: mol_type = other RNA
ccagtcccgccagtccgcca

SEQ ID NO: 2376 - RNA, 20 nt, synthetic construct
  source 1..20: mol_type = other RNA
ccagtccgccaacacagtag

SEQ ID NO: 2377 - RNA, 20 nt, synthetic construct
  source 1..20: mol_type = other RNA
ccagtgtaccgcacctcccc

SEQ ID NO: 2378 - RNA, 20 nt, synthetic construct
  source 1..20: mol_type = other RNA
ccatatccaagagaaagacc

SEQ ID NO: 2379 - RNA, 20 nt, synthetic construct
  source 1..20: mol_type = other RNA
ccatccagaagtctcggccg

SEQ ID NO: 2380 - RNA, 20 nt, synthetic construct
  source 1..20: mol_type = other RNA
ccatccccccagtgtaccgc

SEQ ID NO: 2381 - RNA, 20 nt, synthetic construct
  source 1..20: mol_type = other RNA
ccatctgaggtgggaagcca

SEQ ID NO: 2382 - RNA, 20 nt, synthetic construct
  source 1..20: mol_type = other RNA
ccattcccggccaggaaacg

SEQ ID NO: 2383 - RNA, 20 nt, synthetic construct
  source 1..20: mol_type = other RNA
ccattgctctcgcagaggga

SEQ ID NO: 2384 - RNA, 20 nt, synthetic construct
  source 1..20: mol_type = other RNA
ccattggcccactcgccgcc

SEQ ID NO: 2385 - RNA, 20 nt, synthetic construct
  source 1..20: mol_type = other RNA
ccattggcctctccgcccac

SEQ ID NO: 2386 - RNA, 20 nt, synthetic construct
  source 1..20: mol_type = other RNA
ccatttgtgttttcacacac

SEQ ID NO: 2387 - RNA, 20 nt, synthetic construct
  source 1..20: mol_type = other RNA
ccattttcccagggagagag

SEQ ID NO: 2388 - RNA, 20 nt, synthetic construct
  source 1..20: mol_type = other RNA
cccaaaggcattaccttcgc

SEQ ID NO: 2389 - RNA, 20 nt, synthetic construct
  source 1..20: mol_type = other RNA
cccaacagtttaactttccc

SEQ ID NO: 2390 - RNA, 20 nt, synthetic construct
  source 1..20: mol_type = other RNA
cccaacgcctcttcaccccc

SEQ ID NO: 2391 - RNA, 20 nt, synthetic construct
  source 1..20: mol_type = other RNA
cccaacgcggcgccacggcg

SEQ ID NO: 2392 - RNA, 20 nt, synthetic construct
  source 1..20: mol_type = other RNA
cccaacgtaacaaacattat

SEQ ID NO: 2393 - RNA, 20 nt, synthetic construct
  source 1..20: mol_type = other RNA
cccaactccccctttcatgt

SEQ ID NO: 2394 - RNA, 20 nt, synthetic construct
  source 1..20: mol_type = other RNA
cccaagaagtgagacaagca

SEQ ID NO: 2395 - RNA, 20 nt, synthetic construct
  source 1..20: mol_type = other RNA
cccaagctcttaggaggatg

SEQ ID NO: 2396 - RNA, 20 nt, synthetic construct
  source 1..20: mol_type = other RNA
cccaaggagagcgagcgcgg

SEQ ID NO: 2397 - RNA, 20 nt, synthetic construct
  source 1..20: mol_type = other RNA
cccaaggcaagtaaaacgac

SEQ ID NO: 2398 - RNA, 20 nt, synthetic construct
  source 1..20: mol_type = other RNA
cccacagcttcgacagccaa

SEQ ID NO: 2399 - RNA, 20 nt, synthetic construct
  source 1..20: mol_type = other RNA
cccaccacacgttctctggc

SEQ ID NO: 2400 - RNA, 20 nt, synthetic construct
  source 1..20: mol_type = other RNA
cccaccagagttccgctccc

SEQ ID NO: 2401 - RNA, 20 nt, synthetic construct
  source 1..20: mol_type = other RNA
cccacccagggggcaacgcg

SEQ ID NO: 2402 - RNA, 20 nt, synthetic construct
  source 1..20: mol_type = other RNA
cccacccccacctcacgggt

SEQ ID NO: 2403 - RNA, 20 nt, synthetic construct
  source 1..20: mol_type = other RNA
cccacccccacgagtgcctg

SEQ ID NO: 2404 - RNA, 20 nt, synthetic construct
  source 1..20: mol_type = other RNA
cccaccctccccttccttcg

SEQ ID NO: 2405 - RNA, 20 nt, synthetic construct
  source 1..20: mol_type = other RNA
cccaccgccccgcacccatt

SEQ ID NO: 2406 - RNA, 20 nt, synthetic construct
  source 1..20: mol_type = other RNA
cccaccgcctgaagggcgag

SEQ ID NO: 2407 - RNA, 20 nt, synthetic construct
  source 1..20: mol_type = other RNA
cccacctacctacccgcccc

SEQ ID NO: 2408 - RNA, 20 nt, synthetic construct
  source 1..20: mol_type = other RNA
cccacctcacgggtacgggc

SEQ ID NO: 2409 - RNA, 20 nt, synthetic construct
  source 1..20: mol_type = other RNA
cccacctcagatggctgctt

SEQ ID NO: 2410 - RNA, 20 nt, synthetic construct
  source 1..20: mol_type = other RNA
cccacgacccaaggagagcg

SEQ ID NO: 2411 - RNA, 20 nt, synthetic construct
  source 1..20: mol_type = other RNA
cccacgagtgcctgtagcag

SEQ ID NO: 2412 - RNA, 20 nt, synthetic construct
  source 1..20: mol_type = other RNA
cccacgggaaaggcaacccc

SEQ ID NO: 2413 - RNA, 20 nt, synthetic construct
  source 1..20: mol_type = other RNA
cccactccctacccccgttc

SEQ ID NO: 2414 - RNA, 20 nt, synthetic construct
  source 1..20: mol_type = other RNA
cccactcgccgccaatcagc

SEQ ID NO: 2415 - RNA, 20 nt, synthetic construct
  source 1..20: mol_type = other RNA
cccagagcgatcagagttgt

SEQ ID NO: 2416 - RNA, 20 nt, synthetic construct
  source 1..20: mol_type = other RNA
cccagcatctctacacccca

SEQ ID NO: 2417 - RNA, 20 nt, synthetic construct
  source 1..20: mol_type = other RNA
cccaggaaaaacatgaaagg

SEQ ID NO: 2418 - RNA, 20 nt, synthetic construct
  source 1..20: mol_type = other RNA
cccaggaaagggggtgaaga

SEQ ID NO: 2419 - RNA, 20 nt, synthetic construct
  source 1..20: mol_type = other RNA
cccaggccccggcagcgcct

SEQ ID NO: 2420 - RNA, 20 nt, synthetic construct
  source 1..20: mol_type = other RNA
cccagggagagagatccccc

SEQ ID NO: 2421 - RNA, 20 nt, synthetic construct
  source 1..20: mol_type = other RNA
cccaggggagggaagggtca

SEQ ID NO: 2422 - RNA, 20 nt, synthetic construct
  source 1..20: mol_type = other RNA
cccagggggcaacgcgagag

SEQ ID NO: 2423 - RNA, 20 nt, synthetic construct
  source 1..20: mol_type = other RNA
cccagtcccgccagtccgcc

SEQ ID NO: 2424 - RNA, 20 nt, synthetic construct
  source 1..20: mol_type = other RNA
cccagtgtaccgcacctccc

SEQ ID NO: 2425 - RNA, 20 nt, synthetic construct
  source 1..20: mol_type = other RNA
cccatccccccagtgtaccg

SEQ ID NO: 2426 - RNA, 20 nt, synthetic construct
  source 1..20: mol_type = other RNA
cccattggcccactcgccgc

SEQ ID NO: 2427 - RNA, 20 nt, synthetic construct
  source 1..20: mol_type = other RNA
cccattttcccagggagaga

SEQ ID NO: 2428 - RNA, 20 nt, synthetic construct
  source 1..20: mol_type = other RNA
ccccaacgcctcttcacccc

SEQ ID NO: 2429 - RNA, 20 nt, synthetic construct
  source 1..20: mol_type = other RNA
ccccaagctcttaggaggat

SEQ ID NO: 2430 - RNA, 20 nt, synthetic construct
  source 1..20: mol_type = other RNA
ccccaccacacgttctctgg

SEQ ID NO: 2431 - RNA, 20 nt, synthetic construct
  source 1..20: mol_type = other RNA
ccccacccagggggcaacgc

SEQ ID NO: 2432 - RNA, 20 nt, synthetic construct
  source 1..20: mol_type = other RNA
ccccacccccacctcacggg

SEQ ID NO: 2433 - RNA, 20 nt, synthetic construct
  source 1..20: mol_type = other RNA
ccccacccccacgagtgcct

SEQ ID NO: 2434 - RNA, 20 nt, synthetic construct
  source 1..20: mol_type = other RNA
ccccacctacctacccgccc

SEQ ID NO: 2435 - RNA, 20 nt, synthetic construct
  source 1..20: mol_type = other RNA
ccccacctcacgggtacggg

SEQ ID NO: 2436 - RNA, 20 nt, synthetic construct
  source 1..20: mol_type = other RNA
ccccacgagtgcctgtagca

SEQ ID NO: 2437 - RNA, 20 nt, synthetic construct
  source 1..20: mol_type = other RNA
ccccactccctacccccgtt

SEQ ID NO: 2438 - RNA, 20 nt, synthetic construct
  source 1..20: mol_type = other RNA
ccccagagcgatcagagttg

SEQ ID NO: 2439 - RNA, 20 nt, synthetic construct
  source 1..20: mol_type = other RNA
ccccaggggagggaagggtc

SEQ ID NO: 2440 - RNA, 20 nt, synthetic construct
  source 1..20: mol_type = other RNA
ccccagtcccgccagtccgc

SEQ ID NO: 2441 - RNA, 20 nt, synthetic construct
  source 1..20: mol_type = other RNA
ccccagtgtaccgcacctcc

SEQ ID NO: 2442 - RNA, 20 nt, synthetic construct
  source 1..20: mol_type = other RNA
ccccattttcccagggagag

SEQ ID NO: 2443 - RNA, 20 nt, synthetic construct
  source 1..20: mol_type = other RNA
cccccaacgcctcttcaccc

SEQ ID NO: 2444 - RNA, 20 nt, synthetic construct
  source 1..20: mol_type = other RNA
cccccaccacacgttctctg

SEQ ID NO: 2445 - RNA, 20 nt, synthetic construct
  source 1..20: mol_type = other RNA
cccccacccccacctcacgg

SEQ ID NO: 2446 - RNA, 20 nt, synthetic construct
  source 1..20: mol_type = other RNA
cccccacccccacgagtgcc

SEQ ID NO: 2447 - RNA, 20 nt, synthetic construct
  source 1..20: mol_type = other RNA
cccccacctcacgggtacgg

SEQ ID NO: 2448 - RNA, 20 nt, synthetic construct
  source 1..20: mol_type = other RNA
cccccacgagtgcctgtagc

SEQ ID NO: 2449 - RNA, 20 nt, synthetic construct
  source 1..20: mol_type = other RNA
cccccactccctacccccgt

SEQ ID NO: 2450 - RNA, 20 nt, synthetic construct
  source 1..20: mol_type = other RNA
cccccagagcgatcagagtt

SEQ ID NO: 2451 - RNA, 20 nt, synthetic construct
  source 1..20: mol_type = other RNA
cccccagtgtaccgcacctc

SEQ ID NO: 2452 - RNA, 20 nt, synthetic construct
  source 1..20: mol_type = other RNA
ccccccacccccacctcacg

SEQ ID NO: 2453 - RNA, 20 nt, synthetic construct
  source 1..20: mol_type = other RNA
ccccccagtgtaccgcacct

SEQ ID NO: 2454 - RNA, 20 nt, synthetic construct
  source 1..20: mol_type = other RNA
cccccctagccacccatccc

SEQ ID NO: 2455 - RNA, 20 nt, synthetic construct
  source 1..20: mol_type = other RNA
cccccctccccgcctttggc

SEQ ID NO: 2456 - RNA, 20 nt, synthetic construct
  source 1..20: mol_type = other RNA
cccccctcgccgccttgcac

SEQ ID NO: 2457 - RNA, 20 nt, synthetic construct
  source 1..20: mol_type = other RNA
cccccctctttccctggccc

SEQ ID NO: 2458 - RNA, 20 nt, synthetic construct
  source 1..20: mol_type = other RNA
cccccgaaggaaggggaggg

SEQ ID NO: 2459 - RNA, 20 nt, synthetic construct
  source 1..20: mol_type = other RNA
cccccgcaagccaccagacg

SEQ ID NO: 2460 - RNA, 20 nt, synthetic construct
  source 1..20: mol_type = other RNA
cccccgcgccccgcgcagtg

SEQ ID NO: 2461 - RNA, 20 nt, synthetic construct
  source 1..20: mol_type = other RNA
cccccgctcctcccccaccc

SEQ ID NO: 2462 - RNA, 20 nt, synthetic construct
  source 1..20: mol_type = other RNA
cccccgttctcgcggccttg

SEQ ID NO: 2463 - RNA, 20 nt, synthetic construct
  source 1..20: mol_type = other RNA
ccccctagccacccatcccc

SEQ ID NO: 2464 - RNA, 20 nt, synthetic construct
  source 1..20: mol_type = other RNA
ccccctccccgcctttggct

SEQ ID NO: 2465 - RNA, 20 nt, synthetic construct
  source 1..20: mol_type = other RNA
ccccctcccgccgcgccatt

SEQ ID NO: 2466 - RNA, 20 nt, synthetic construct
  source 1..20: mol_type = other RNA
ccccctcgccgccttgcaca

SEQ ID NO: 2467 - RNA, 20 nt, synthetic construct
  source 1..20: mol_type = other RNA
ccccctctaatctaggcgac

SEQ ID NO: 2468 - RNA, 20 nt, synthetic construct
  source 1..20: mol_type = other RNA
ccccctgggtggggcgggta

SEQ ID NO: 2469 - RNA, 20 nt, synthetic construct
  source 1..20: mol_type = other RNA
ccccctttcatgtttttcct

SEQ ID NO: 2470 - RNA, 20 nt, synthetic construct
  source 1..20: mol_type = other RNA
ccccctttcctgggaactgc

SEQ ID NO: 2471 - RNA, 20 nt, synthetic construct
  source 1..20: mol_type = other RNA
ccccgaaggaaggggagggt

SEQ ID NO: 2472 - RNA, 20 nt, synthetic construct
  source 1..20: mol_type = other RNA
ccccgaggccgagcgccgca

SEQ ID NO: 2473 - RNA, 20 nt, synthetic construct
  source 1..20: mol_type = other RNA
ccccgatcccccactcccta

SEQ ID NO: 2474 - RNA, 20 nt, synthetic construct
  source 1..20: mol_type = other RNA
ccccgcaagccaccagacgg

SEQ ID NO: 2475 - RNA, 20 nt, synthetic construct
  source 1..20: mol_type = other RNA
ccccgcacccattggcccac

SEQ ID NO: 2476 - RNA, 20 nt, synthetic construct
  source 1..20: mol_type = other RNA
ccccgcctccagcgcgcgct

SEQ ID NO: 2477 - RNA, 20 nt, synthetic construct
  source 1..20: mol_type = other RNA
ccccgcctttggctcgctcc

SEQ ID NO: 2478 - RNA, 20 nt, synthetic construct
  source 1..20: mol_type = other RNA
ccccgcgcagtggtttcgct

SEQ ID NO: 2479 - RNA, 20 nt, synthetic construct
  source 1..20: mol_type = other RNA
ccccgcgccccgcgcagtgg

SEQ ID NO: 2480 - RNA, 20 nt, synthetic construct
  source 1..20: mol_type = other RNA
ccccgcgcccctgcgcaacg

SEQ ID NO: 2481 - RNA, 20 nt, synthetic construct
  source 1..20: mol_type = other RNA
ccccgcgctcgctctccttg

SEQ ID NO: 2482 - RNA, 20 nt, synthetic construct
  source 1..20: mol_type = other RNA
ccccgctcctcccccacccc

SEQ ID NO: 2483 - RNA, 20 nt, synthetic construct
  source 1..20: mol_type = other RNA
ccccggcagcgcctgggaca

SEQ ID NO: 2484 - RNA, 20 nt, synthetic construct
  source 1..20: mol_type = other RNA
ccccggcggcttccgctgat

SEQ ID NO: 2485 - RNA, 20 nt, synthetic construct
  source 1..20: mol_type = other RNA
ccccgggttcccaccgcctg

SEQ ID NO: 2486 - RNA, 20 nt, synthetic construct
  source 1..20: mol_type = other RNA
ccccgtgcggtcagtggcgt

SEQ ID NO: 2487 - RNA, 20 nt, synthetic construct
  source 1..20: mol_type = other RNA
ccccgtggcgtgtgccacag

SEQ ID NO: 2488 - RNA, 20 nt, synthetic construct
  source 1..20: mol_type = other RNA
ccccgttctcgcggccttgt

SEQ ID NO: 2489 - RNA, 20 nt, synthetic construct
  source 1..20: mol_type = other RNA
cccctacctagccgaggctc

SEQ ID NO: 2490 - RNA, 20 nt, synthetic construct
  source 1..20: mol_type = other RNA
cccctagccacccatccccc

SEQ ID NO: 2491 - RNA, 20 nt, synthetic construct
  source 1..20: mol_type = other RNA
cccctcccaccagagttccg

SEQ ID NO: 2492 - RNA, 20 nt, synthetic construct
  source 1..20: mol_type = other RNA
cccctcccccaacgcctctt

SEQ ID NO: 2493 - RNA, 20 nt, synthetic construct
  source 1..20: mol_type = other RNA
cccctccccgcctttggctc

SEQ ID NO: 2494 - RNA, 20 nt, synthetic construct
  source 1..20: mol_type = other RNA
cccctcccgccgcgccattg

SEQ ID NO: 2495 - RNA, 20 nt, synthetic construct
  source 1..20: mol_type = other RNA
cccctccgtaatcttcctgg

SEQ ID NO: 2496 - RNA, 20 nt, synthetic construct
  source 1..20: mol_type = other RNA
cccctcgccgccttgcacac

SEQ ID NO: 2497 - RNA, 20 nt, synthetic construct
  source 1..20: mol_type = other RNA
cccctctaatctaggcgacc

SEQ ID NO: 2498 - RNA, 20 nt, synthetic construct
  source 1..20: mol_type = other RNA
cccctgcgcaacgtggcagg

SEQ ID NO: 2499 - RNA, 20 nt, synthetic construct
  source 1..20: mol_type = other RNA
cccctggggcccgatcgtga

SEQ ID NO: 2500 - RNA, 20 nt, synthetic construct
  source 1..20: mol_type = other RNA
cccctgggtggggcgggtag

SEQ ID NO: 2501 - RNA, 20 nt, synthetic construct
  source 1..20: mol_type = other RNA
ccccttccttcgggggagtc

SEQ ID NO: 2502 - RNA, 20 nt, synthetic construct
  source 1..20: mol_type = other RNA
ccccttctatgctaattgat

SEQ ID NO: 2503 - RNA, 20 nt, synthetic construct
  source 1..20: mol_type = other RNA
cccctttcatgtttttcctg

SEQ ID NO: 2504 - RNA, 20 nt, synthetic construct
  source 1..20: mol_type = other RNA
cccctttccctcccaacgta

SEQ ID NO: 2505 - RNA, 20 nt, synthetic construct
  source 1..20: mol_type = other RNA
cccctttcctgggaactgcc

SEQ ID NO: 2506 - RNA, 20 nt, synthetic construct
  source 1..20: mol_type = other RNA
cccgaaggaaggggagggtg

SEQ ID NO: 2507 - RNA, 20 nt, synthetic construct
  source 1..20: mol_type = other RNA
cccgacctgctacaggcact

SEQ ID NO: 2508 - RNA, 20 nt, synthetic construct
  source 1..20: mol_type = other RNA
cccgacggcgtaactgacag

SEQ ID NO: 2509 - RNA, 20 nt, synthetic construct
  source 1..20: mol_type = other RNA
cccgacttacacgcagaggg

SEQ ID NO: 2510 - RNA, 20 nt, synthetic construct
  source 1..20: mol_type = other RNA
cccgacttcccacgggaaag

SEQ ID NO: 2511 - RNA, 20 nt, synthetic construct
  source 1..20: mol_type = other RNA
cccgagcggaaacgccactg

SEQ ID NO: 2512 - RNA, 20 nt, synthetic construct
  source 1..20: mol_type = other RNA
cccgaggccgagcgccgcag

SEQ ID NO: 2513 - RNA, 20 nt, synthetic construct
  source 1..20: mol_type = other RNA
cccgatcccccactccctac

SEQ ID NO: 2514 - RNA, 20 nt, synthetic construct
  source 1..20: mol_type = other RNA
cccgatcgtgaggttcggtc

SEQ ID NO: 2515 - RNA, 20 nt, synthetic construct
  source 1..20: mol_type = other RNA
cccgcaagccaccagacggc

SEQ ID NO: 2516 - RNA, 20 nt, synthetic construct
  source 1..20: mol_type = other RNA
cccgcacacccagcatctct

SEQ ID NO: 2517 - RNA, 20 nt, synthetic construct
  source 1..20: mol_type = other RNA
cccgcacccattggcccact

SEQ ID NO: 2518 - RNA, 20 nt, synthetic construct
  source 1..20: mol_type = other RNA
cccgccagtccgccaacaca

SEQ ID NO: 2519 - RNA, 20 nt, synthetic construct
  source 1..20: mol_type = other RNA
cccgccccacccagggggca

SEQ ID NO: 2520 - RNA, 20 nt, synthetic construct
  source 1..20: mol_type = other RNA
cccgccgcctgcttgtcttc

SEQ ID NO: 2521 - RNA, 20 nt, synthetic construct
  source 1..20: mol_type = other RNA
cccgccgcgccattggcctc

SEQ ID NO: 2522 - RNA, 20 nt, synthetic construct
  source 1..20: mol_type = other RNA
cccgccgtgtgtgaaaacac

SEQ ID NO: 2523 - RNA, 20 nt, synthetic construct
  source 1..20: mol_type = other RNA
cccgcctccagcgcgcgctt

SEQ ID NO: 2524 - RNA, 20 nt, synthetic construct
  source 1..20: mol_type = other RNA
cccgcctgcatccagccacc

SEQ ID NO: 2525 - RNA, 20 nt, synthetic construct
  source 1..20: mol_type = other RNA
cccgcctgcgctcagagact

SEQ ID NO: 2526 - RNA, 20 nt, synthetic construct
  source 1..20: mol_type = other RNA
cccgcctttggctcgctccg

SEQ ID NO: 2527 - RNA, 20 nt, synthetic construct
  source 1..20: mol_type = other RNA
cccgcgcagtggtttcgctc

SEQ ID NO: 2528 - RNA, 20 nt, synthetic construct
  source 1..20: mol_type = other RNA
cccgcgccagagccgatttc

SEQ ID NO: 2529 - RNA, 20 nt, synthetic construct
  source 1..20: mol_type = other RNA
cccgcgccccgcgcagtggt

SEQ ID NO: 2530 - RNA, 20 nt, synthetic construct
  source 1..20: mol_type = other RNA
cccgcgcccctgcgcaacgt

SEQ ID NO: 2531 - RNA, 20 nt, synthetic construct
  source 1..20: mol_type = other RNA
cccgcgctcgctctccttgg

SEQ ID NO: 2532 - RNA, 20 nt, synthetic construct
  source 1..20: mol_type = other RNA
cccgctcctcccccaccccc

SEQ ID NO: 2533 - RNA, 20 nt, synthetic construct
  source 1..20: mol_type = other RNA
cccgctgcccgagcggaaac

SEQ ID NO: 2534 - RNA, 20 nt, synthetic construct
  source 1..20: mol_type = other RNA
cccggcagcgcctgggacaa

SEQ ID NO: 2535 - RNA, 20 nt, synthetic construct
  source 1..20: mol_type = other RNA
cccggcggcttccgctgatt

SEQ ID NO: 2536 - RNA, 20 nt, synthetic construct
  source 1..20: mol_type = other RNA
cccgggaggcggcaggactc

SEQ ID NO: 2537 - RNA, 20 nt, synthetic construct
  source 1..20: mol_type = other RNA
cccgggttcccaccgcctga

SEQ ID NO: 2538 - RNA, 20 nt, synthetic construct
  source 1..20: mol_type = other RNA
cccggtcccacagcttcgac

SEQ ID NO: 2539 - RNA, 20 nt, synthetic construct
  source 1..20: mol_type = other RNA
cccgtacccgtgaggtgggg

SEQ ID NO: 2540 - RNA, 20 nt, synthetic construct
  source 1..20: mol_type = other RNA
cccgtgaggtgggggtgggg

SEQ ID NO: 2541 - RNA, 20 nt, synthetic construct
  source 1..20: mol_type = other RNA
cccgtgcggtcagtggcgtt

SEQ ID NO: 2542 - RNA, 20 nt, synthetic construct
  source 1..20: mol_type = other RNA
cccgtggcgtgtgccacagc

SEQ ID NO: 2543 - RNA, 20 nt, synthetic construct
  source 1..20: mol_type = other RNA
cccgtgggaagtcgggaaca

SEQ ID NO: 2544 - RNA, 20 nt, synthetic construct
  source 1..20: mol_type = other RNA
cccgttctcgcggccttgtg

SEQ ID NO: 2545 - RNA, 20 nt, synthetic construct
  source 1..20: mol_type = other RNA
ccctacacattcaacgaggc

SEQ ID NO: 2546 - RNA, 20 nt, synthetic construct
  source 1..20: mol_type = other RNA
ccctacccccgttctcgcgg

SEQ ID NO: 2547 - RNA, 20 nt, synthetic construct
  source 1..20: mol_type = other RNA
ccctacctagccgaggctct

SEQ ID NO: 2548 - RNA, 20 nt, synthetic construct
  source 1..20: mol_type = other RNA
ccctagccacccatcccccc

SEQ ID NO: 2549 - RNA, 20 nt, synthetic construct
  source 1..20: mol_type = other RNA
ccctcccaacgtaacaaaca

SEQ ID NO: 2550 - RNA, 20 nt, synthetic construct
  source 1..20: mol_type = other RNA
ccctcccaccagagttccgc

SEQ ID NO: 2551 - RNA, 20 nt, synthetic construct
  source 1..20: mol_type = other RNA
ccctccccaagctcttagga

SEQ ID NO: 2552 - RNA, 20 nt, synthetic construct
  source 1..20: mol_type = other RNA
ccctcccccaacgcctcttc

SEQ ID NO: 2553 - RNA, 20 nt, synthetic construct
  source 1..20: mol_type = other RNA
ccctccccgcctttggctcg

SEQ ID NO: 2554 - RNA, 20 nt, synthetic construct
  source 1..20: mol_type = other RNA
ccctcccctggggcccgatc

SEQ ID NO: 2555 - RNA, 20 nt, synthetic construct
  source 1..20: mol_type = other RNA
ccctccccttccttcggggg

SEQ ID NO: 2556 - RNA, 20 nt, synthetic construct
  source 1..20: mol_type = other RNA
ccctcccgccgcgccattgg

SEQ ID NO: 2557 - RNA, 20 nt, synthetic construct
  source 1..20: mol_type = other RNA
ccctcccgcctgcatccagc

SEQ ID NO: 2558 - RNA, 20 nt, synthetic construct
  source 1..20: mol_type = other RNA
ccctccgctcgaaatacaca

SEQ ID NO: 2559 - RNA, 20 nt, synthetic construct
  source 1..20: mol_type = other RNA
ccctccgtaatcttcctgga

SEQ ID NO: 2560 - RNA, 20 nt, synthetic construct
  source 1..20: mol_type = other RNA
ccctcgccgccttgcacaca

SEQ ID NO: 2561 - RNA, 20 nt, synthetic construct
  source 1..20: mol_type = other RNA
ccctctaatctaggcgaccc

SEQ ID NO: 2562 - RNA, 20 nt, synthetic construct
  source 1..20: mol_type = other RNA
ccctctcatgcgatttacct

SEQ ID NO: 2563 - RNA, 20 nt, synthetic construct
  source 1..20: mol_type = other RNA
ccctctcgttttctggcttc

SEQ ID NO: 2564 - RNA, 20 nt, synthetic construct
  source 1..20: mol_type = other RNA
ccctctgcgagagcaatggc

SEQ ID NO: 2565 - RNA, 20 nt, synthetic construct
  source 1..20: mol_type = other RNA
ccctctgcgtgtaagtcggg

SEQ ID NO: 2566 - RNA, 20 nt, synthetic construct
  source 1..20: mol_type = other RNA
ccctgcgcaacgtggcagga

SEQ ID NO: 2567 - RNA, 20 nt, synthetic construct
  source 1..20: mol_type = other RNA
ccctgcggcaaccggagggg

SEQ ID NO: 2568 - RNA, 20 nt, synthetic construct
  source 1..20: mol_type = other RNA
ccctggcgccggcgctggga

SEQ ID NO: 2569 - RNA, 20 nt, synthetic construct
  source 1..20: mol_type = other RNA
ccctgggaaaatggggtgtt

SEQ ID NO: 2570 - RNA, 20 nt, synthetic construct
  source 1..20: mol_type = other RNA
ccctggggcccgatcgtgag

SEQ ID NO: 2571 - RNA, 20 nt, synthetic construct
  source 1..20: mol_type = other RNA
ccctgggtggggcgggtagg

SEQ ID NO: 2572 - RNA, 20 nt, synthetic construct
  source 1..20: mol_type = other RNA
ccctggttcaagtaggtaaa

SEQ ID NO: 2573 - RNA, 20 nt, synthetic construct
  source 1..20: mol_type = other RNA
cccttaccttgtcccaggcg

SEQ ID NO: 2574 - RNA, 20 nt, synthetic construct
  source 1..20: mol_type = other RNA
cccttcaggcggtgggaacc

SEQ ID NO: 2575 - RNA, 20 nt, synthetic construct
  source 1..20: mol_type = other RNA
cccttccctcccctggggcc

SEQ ID NO: 2576 - RNA, 20 nt, synthetic construct
  source 1..20: mol_type = other RNA
cccttccttcgggggagtcg

SEQ ID NO: 2577 - RNA, 20 nt, synthetic construct
  source 1..20: mol_type = other RNA
cccttctatgctaattgatt

SEQ ID NO: 2578 - RNA, 20 nt, synthetic construct
  source 1..20: mol_type = other RNA
cccttctccctccccctccg

SEQ ID NO: 2579 - RNA, 20 nt, synthetic construct
  source 1..20: mol_type = other RNA
cccttgaggagaggcctctt

SEQ ID NO: 2580 - RNA, 20 nt, synthetic construct
  source 1..20: mol_type = other RNA
cccttgctactggctcgagt

SEQ ID NO: 2581 - RNA, 20 nt, synthetic construct
  source 1..20: mol_type = other RNA
ccctttatgaattctctttc

SEQ ID NO: 2582 - RNA, 20 nt, synthetic construct
  source 1..20: mol_type = other RNA
ccctttcatgtttttcctgg

SEQ ID NO: 2583 - RNA, 20 nt, synthetic construct
  source 1..20: mol_type = other RNA
ccctttccctcccaacgtaa

SEQ ID NO: 2584 - RNA, 20 nt, synthetic construct
  source 1..20: mol_type = other RNA
ccctttcctgggaactgcct

SEQ ID NO: 2585 - RNA, 20 nt, synthetic construct
  source 1..20: mol_type = other RNA
ccgaacctcacgatcgggcc

SEQ ID NO: 2586 - RNA, 20 nt, synthetic construct
  source 1..20: mol_type = other RNA
ccgaagcacagcctcttctc

SEQ ID NO: 2587 - RNA, 20 nt, synthetic construct
  source 1..20: mol_type = other RNA
ccgaaggaaggggagggtgg

SEQ ID NO: 2588 - RNA, 20 nt, synthetic construct
  source 1..20: mol_type = other RNA
ccgacagaaaagagaccgaa

SEQ ID NO: 2589 - RNA, 20 nt, synthetic construct
  source 1..20: mol_type = other RNA
ccgacctgctacaggcactc

SEQ ID NO: 2590 - RNA, 20 nt, synthetic construct
  source 1..20: mol_type = other RNA
ccgacggcgtaactgacagg

SEQ ID NO: 2591 - RNA, 20 nt, synthetic construct
  source 1..20: mol_type = other RNA
ccgactcccccgaaggaagg

SEQ ID NO: 2592 - RNA, 20 nt, synthetic construct
  source 1..20: mol_type = other RNA
ccgacttacacgcagaggga

SEQ ID NO: 2593 - RNA, 20 nt, synthetic construct
  source 1..20: mol_type = other RNA
ccgacttcccacgggaaagg

SEQ ID NO: 2594 - RNA, 20 nt, synthetic construct
  source 1..20: mol_type = other RNA
ccgagacttctggatggcgg

SEQ ID NO: 2595 - RNA, 20 nt, synthetic construct
  source 1..20: mol_type = other RNA
ccgagcggaaacgccactga

SEQ ID NO: 2596 - RNA, 20 nt, synthetic construct
  source 1..20: mol_type = other RNA
ccgaggccgagcgccgcagt

SEQ ID NO: 2597 - RNA, 20 nt, synthetic construct
  source 1..20: mol_type = other RNA
ccgaggctctctgaggagcc

SEQ ID NO: 2598 - RNA, 20 nt, synthetic construct
  source 1..20: mol_type = other RNA
ccgatcccccactccctacc

SEQ ID NO: 2599 - RNA, 20 nt, synthetic construct
  source 1..20: mol_type = other RNA
ccgatcgtgaggttcggtct

SEQ ID NO: 2600 - RNA, 20 nt, synthetic construct
  source 1..20: mol_type = other RNA
ccgattggccgtttctcctc

SEQ ID NO: 2601 - RNA, 20 nt, synthetic construct
  source 1..20: mol_type = other RNA
ccgatttcactgaccctccc

SEQ ID NO: 2602 - RNA, 20 nt, synthetic construct
  source 1..20: mol_type = other RNA
ccgcaagccaccagacggcc

SEQ ID NO: 2603 - RNA, 20 nt, synthetic construct
  source 1..20: mol_type = other RNA
ccgcacacccagcatctcta

SEQ ID NO: 2604 - RNA, 20 nt, synthetic construct
  source 1..20: mol_type = other RNA
ccgcacccattggcccactc

SEQ ID NO: 2605 - RNA, 20 nt, synthetic construct
  source 1..20: mol_type = other RNA
ccgcacctcccctcccacca

SEQ ID NO: 2606 - RNA, 20 nt, synthetic construct
  source 1..20: mol_type = other RNA
ccgccaacacagtagtgccg

SEQ ID NO: 2607 - RNA, 20 nt, synthetic construct
  source 1..20: mol_type = other RNA
ccgccaatcagcggaagccg

SEQ ID NO: 2608 - RNA, 20 nt, synthetic construct
  source 1..20: mol_type = other RNA
ccgccagtccgccaacacag

SEQ ID NO: 2609 - RNA, 20 nt, synthetic construct
  source 1..20: mol_type = other RNA
ccgccatccagaagtctcgg

SEQ ID NO: 2610 - RNA, 20 nt, synthetic construct
  source 1..20: mol_type = other RNA
ccgccccacccagggggcaa

SEQ ID NO: 2611 - RNA, 20 nt, synthetic construct
  source 1..20: mol_type = other RNA
ccgccccgcacccattggcc

SEQ ID NO: 2612 - RNA, 20 nt, synthetic construct
  source 1..20: mol_type = other RNA
ccgccccgggttcccaccgc

SEQ ID NO: 2613 - RNA, 20 nt, synthetic construct
  source 1..20: mol_type = other RNA
ccgcccgcctgcgctcagag

SEQ ID NO: 2614 - RNA, 20 nt, synthetic construct
  source 1..20: mol_type = other RNA
ccgccgccatccagaagtct

SEQ ID NO: 2615 - RNA, 20 nt, synthetic construct
  source 1..20: mol_type = other RNA
ccgccgcccgcctgcgctca

SEQ ID NO: 2616 - RNA, 20 nt, synthetic construct
  source 1..20: mol_type = other RNA
ccgccgcctgcttgtcttcg

SEQ ID NO: 2617 - RNA, 20 nt, synthetic construct
  source 1..20: mol_type = other RNA
ccgccgcgccattggcctct

SEQ ID NO: 2618 - RNA, 20 nt, synthetic construct
  source 1..20: mol_type = other RNA
ccgccggggccgcctagaga

SEQ ID NO: 2619 - RNA, 20 nt, synthetic construct
  source 1..20: mol_type = other RNA
ccgccgtgtgtgaaaacaca

SEQ ID NO: 2620 - RNA, 20 nt, synthetic construct
  source 1..20: mol_type = other RNA
ccgcctagagaagaggctgt

SEQ ID NO: 2621 - RNA, 20 nt, synthetic construct
  source 1..20: mol_type = other RNA
ccgcctccagcgcgcgcttc

SEQ ID NO: 2622 - RNA, 20 nt, synthetic construct
  source 1..20: mol_type = other RNA
ccgcctgaagggcgagacaa

SEQ ID NO: 2623 - RNA, 20 nt, synthetic construct
  source 1..20: mol_type = other RNA
ccgcctgcatccagccaccc

SEQ ID NO: 2624 - RNA, 20 nt, synthetic construct
  source 1..20: mol_type = other RNA
ccgcctgcgctcagagactc

SEQ ID NO: 2625 - RNA, 20 nt, synthetic construct
  source 1..20: mol_type = other RNA
ccgcctgcttgtcttcgaca

SEQ ID NO: 2626 - RNA, 20 nt, synthetic construct
  source 1..20: mol_type = other RNA
ccgccttgcacacaccgttg

SEQ ID NO: 2627 - RNA, 20 nt, synthetic construct
  source 1..20: mol_type = other RNA
ccgcctttctgccccccacc

SEQ ID NO: 2628 - RNA, 20 nt, synthetic construct
  source 1..20: mol_type = other RNA
ccgcctttggctcgctccgc

SEQ ID NO: 2629 - RNA, 20 nt, synthetic construct
  source 1..20: mol_type = other RNA
ccgcgagaacgggggtaggg

SEQ ID NO: 2630 - RNA, 20 nt, synthetic construct
  source 1..20: mol_type = other RNA
ccgcgatctcccctccgtaa

SEQ ID NO: 2631 - RNA, 20 nt, synthetic construct
  source 1..20: mol_type = other RNA
ccgcgcagtggtttcgctca

SEQ ID NO: 2632 - RNA, 20 nt, synthetic construct
  source 1..20: mol_type = other RNA
ccgcgccagagccgatttca

SEQ ID NO: 2633 - RNA, 20 nt, synthetic construct
  source 1..20: mol_type = other RNA
ccgcgccattggcctctccg

SEQ ID NO: 2634 - RNA, 20 nt, synthetic construct
  source 1..20: mol_type = other RNA
ccgcgccccgcgcagtggtt

SEQ ID NO: 2635 - RNA, 20 nt, synthetic construct
  source 1..20: mol_type = other RNA
ccgcgcccctgcgcaacgtg

SEQ ID NO: 2636 - RNA, 20 nt, synthetic construct
  source 1..20: mol_type = other RNA
ccgcgcccgcacacccagca

SEQ ID NO: 2637 - RNA, 20 nt, synthetic construct
  source 1..20: mol_type = other RNA
ccgcgctcgctctccttggg

SEQ ID NO: 2638 - RNA, 20 nt, synthetic construct
  source 1..20: mol_type = other RNA
ccgcggccgccgccatccag

SEQ ID NO: 2639 - RNA, 20 nt, synthetic construct
  source 1..20: mol_type = other RNA
ccgcgttgggcctaactcga

SEQ ID NO: 2640 - RNA, 20 nt, synthetic construct
  source 1..20: mol_type = other RNA
ccgctcccctacctagccga

SEQ ID NO: 2641 - RNA, 20 nt, synthetic construct
  source 1..20: mol_type = other RNA
ccgctcccttctccctcccc

SEQ ID NO: 2642 - RNA, 20 nt, synthetic construct
  source 1..20: mol_type = other RNA
ccgctcctcccccaccccca

SEQ ID NO: 2643 - RNA, 20 nt, synthetic construct
  source 1..20: mol_type = other RNA
ccgctcgaaatacacaggca

SEQ ID NO: 2644 - RNA, 20 nt, synthetic construct
  source 1..20: mol_type = other RNA
ccgctcgggcagcgggctga

SEQ ID NO: 2645 - RNA, 20 nt, synthetic construct
  source 1..20: mol_type = other RNA
ccgctgattggcggcgagtg

SEQ ID NO: 2646 - RNA, 20 nt, synthetic construct
  source 1..20: mol_type = other RNA
ccgctgcccgagcggaaacg

SEQ ID NO: 2647 - RNA, 20 nt, synthetic construct
  source 1..20: mol_type = other RNA
ccgcttagcgactctcgcgt

SEQ ID NO: 2648 - RNA, 20 nt, synthetic construct
  source 1..20: mol_type = other RNA
ccggaagcgctcctccctct

SEQ ID NO: 2649 - RNA, 20 nt, synthetic construct
  source 1..20: mol_type = other RNA
ccggacggagccattgctct

SEQ ID NO: 2650 - RNA, 20 nt, synthetic construct
  source 1..20: mol_type = other RNA
ccggagcgccgaagcacagc

SEQ ID NO: 2651 - RNA, 20 nt, synthetic construct
  source 1..20: mol_type = other RNA
ccggagggggagggagaagg

SEQ ID NO: 2652 - RNA, 20 nt, synthetic construct
  source 1..20: mol_type = other RNA
ccggcactactgtgttggcg

SEQ ID NO: 2653 - RNA, 20 nt, synthetic construct
  source 1..20: mol_type = other RNA
ccggcagcgcctgggacaag

SEQ ID NO: 2654 - RNA, 20 nt, synthetic construct
  source 1..20: mol_type = other RNA
ccggccaggaaacgccgtgg

SEQ ID NO: 2655 - RNA, 20 nt, synthetic construct
  source 1..20: mol_type = other RNA
ccggcccccctctttccctg

SEQ ID NO: 2656 - RNA, 20 nt, synthetic construct
  source 1..20: mol_type = other RNA
ccggccgagacttctggatg

SEQ ID NO: 2657 - RNA, 20 nt, synthetic construct
  source 1..20: mol_type = other RNA
ccggccgcgcccgcacaccc

SEQ ID NO: 2658 - RNA, 20 nt, synthetic construct
  source 1..20: mol_type = other RNA
ccggcgctgggaatccccgt

SEQ ID NO: 2659 - RNA, 20 nt, synthetic construct
  source 1..20: mol_type = other RNA
ccggcggcttccgctgattg

SEQ ID NO: 2660 - RNA, 20 nt, synthetic construct
  source 1..20: mol_type = other RNA
ccggctagcctcttgtcgcc

SEQ ID NO: 2661 - RNA, 20 nt, synthetic construct
  source 1..20: mol_type = other RNA
ccggctcctcagagagcctc

SEQ ID NO: 2662 - RNA, 20 nt, synthetic construct
  source 1..20: mol_type = other RNA
ccgggaatggcccgtacccg

SEQ ID NO: 2663 - RNA, 20 nt, synthetic construct
  source 1..20: mol_type = other RNA
ccgggaggcggcaggactcg

SEQ ID NO: 2664 - RNA, 20 nt, synthetic construct
  source 1..20: mol_type = other RNA
ccgggcccttgctactggct

SEQ ID NO: 2665 - RNA, 20 nt, synthetic construct
  source 1..20: mol_type = other RNA
ccggggccgcctagagaaga

SEQ ID NO: 2666 - RNA, 20 nt, synthetic construct
  source 1..20: mol_type = other RNA
ccgggttcccaccgcctgaa

SEQ ID NO: 2667 - RNA, 20 nt, synthetic construct
  source 1..20: mol_type = other RNA
ccggtcccacagcttcgaca

SEQ ID NO: 2668 - RNA, 20 nt, synthetic construct
  source 1..20: mol_type = other RNA
ccggtttcgagcattttccg

SEQ ID NO: 2669 - RNA, 20 nt, synthetic construct
  source 1..20: mol_type = other RNA
ccgtaatcttcctggacgcc

SEQ ID NO: 2670 - RNA, 20 nt, synthetic construct
  source 1..20: mol_type = other RNA
ccgtaccaacgcccgcctcc

SEQ ID NO: 2671 - RNA, 20 nt, synthetic construct
  source 1..20: mol_type = other RNA
ccgtacccgtgaggtggggg

SEQ ID NO: 2672 - RNA, 20 nt, synthetic construct
  source 1..20: mol_type = other RNA
ccgtccggtttcgagcattt

SEQ ID NO: 2673 - RNA, 20 nt, synthetic construct
  source 1..20: mol_type = other RNA
ccgtcgggagtacgcagccg

SEQ ID NO: 2674 - RNA, 20 nt, synthetic construct
  source 1..20: mol_type = other RNA
ccgtctccccgcgctcgctc

SEQ ID NO: 2675 - RNA, 20 nt, synthetic construct
  source 1..20: mol_type = other RNA
ccgtctggtggcttgcgggg

SEQ ID NO: 2676 - RNA, 20 nt, synthetic construct
  source 1..20: mol_type = other RNA
ccgtgaggtgggggtggggg

SEQ ID NO: 2677 - RNA, 20 nt, synthetic construct
  source 1..20: mol_type = other RNA
ccgtgcggtcagtggcgttt

SEQ ID NO: 2678 - RNA, 20 nt, synthetic construct
  source 1..20: mol_type = other RNA
ccgtggcgccgcgttgggcc

SEQ ID NO: 2679 - RNA, 20 nt, synthetic construct
  source 1..20: mol_type = other RNA
ccgtggcgtgtgccacagcg

SEQ ID NO: 2680 - RNA, 20 nt, synthetic construct
  source 1..20: mol_type = other RNA
ccgtgggaagtcgggaacat

SEQ ID NO: 2681 - RNA, 20 nt, synthetic construct
  source 1..20: mol_type = other RNA
ccgtgtgtgaaaacacaaat

SEQ ID NO: 2682 - RNA, 20 nt, synthetic construct
  source 1..20: mol_type = other RNA
ccgttctcgcggccttgtga

SEQ ID NO: 2683 - RNA, 20 nt, synthetic construct
  source 1..20: mol_type = other RNA
ccgttgcaacaccccatttt

SEQ ID NO: 2684 - RNA, 20 nt, synthetic construct
  source 1..20: mol_type = other RNA
ccgtttctcctcccgccgtg

SEQ ID NO: 2685 - RNA, 20 nt, synthetic construct
  source 1..20: mol_type = other RNA
cctaactcgagtcctgccgc

SEQ ID NO: 2686 - RNA, 20 nt, synthetic construct
  source 1..20: mol_type = other RNA
cctaagagcttggggagggc

SEQ ID NO: 2687 - RNA, 20 nt, synthetic construct
  source 1..20: mol_type = other RNA
cctacacattcaacgaggct

SEQ ID NO: 2688 - RNA, 20 nt, synthetic construct
  source 1..20: mol_type = other RNA
cctacactcctcttcacatt

SEQ ID NO: 2689 - RNA, 20 nt, synthetic construct
  source 1..20: mol_type = other RNA
cctacccccgttctcgcggc

SEQ ID NO: 2690 - RNA, 20 nt, synthetic construct
  source 1..20: mol_type = other RNA
cctacccgccccacccaggg

SEQ ID NO: 2691 - RNA, 20 nt, synthetic construct
  source 1..20: mol_type = other RNA
cctacctacccgccccaccc

SEQ ID NO: 2692 - RNA, 20 nt, synthetic construct
  source 1..20: mol_type = other RNA
cctacctagccgaggctctc

SEQ ID NO: 2693 - RNA, 20 nt, synthetic construct
  source 1..20: mol_type = other RNA
cctactccacgtttaccttt

SEQ ID NO: 2694 - RNA, 20 nt, synthetic construct
  source 1..20: mol_type = other RNA
cctacttgaaccagggctct

SEQ ID NO: 2695 - RNA, 20 nt, synthetic construct
  source 1..20: mol_type = other RNA
cctagagaagaggctgtgct

SEQ ID NO: 2696 - RNA, 20 nt, synthetic construct
  source 1..20: mol_type = other RNA
cctagattagagggggatct

SEQ ID NO: 2697 - RNA, 20 nt, synthetic construct
  source 1..20: mol_type = other RNA
cctagccacccatcccccca

SEQ ID NO: 2698 - RNA, 20 nt, synthetic construct
  source 1..20: mol_type = other RNA
cctagccgaggctctctgag

SEQ ID NO: 2699 - RNA, 20 nt, synthetic construct
  source 1..20: mol_type = other RNA
cctcaagggaaaggtaaacg

SEQ ID NO: 2700 - RNA, 20 nt, synthetic construct
  source 1..20: mol_type = other RNA
cctcacgatcgggccccagg

SEQ ID NO: 2701 - RNA, 20 nt, synthetic construct
  source 1..20: mol_type = other RNA
cctcacgggtacgggccatt

SEQ ID NO: 2702 - RNA, 20 nt, synthetic construct
  source 1..20: mol_type = other RNA
cctcagagagcctcggctag

SEQ ID NO: 2703 - RNA, 20 nt, synthetic construct
  source 1..20: mol_type = other RNA
cctcagatggctgcttccca

SEQ ID NO: 2704 - RNA, 20 nt, synthetic construct
  source 1..20: mol_type = other RNA
cctccagcgcgcgcttcctg

SEQ ID NO: 2705 - RNA, 20 nt, synthetic construct
  source 1..20: mol_type = other RNA
cctcccaacgtaacaaacat

SEQ ID NO: 2706 - RNA, 20 nt, synthetic construct
  source 1..20: mol_type = other RNA
cctcccaccagagttccgct

SEQ ID NO: 2707 - RNA, 20 nt, synthetic construct
  source 1..20: mol_type = other RNA
cctcccaccctccccttcct

SEQ ID NO: 2708 - RNA, 20 nt, synthetic construct
  source 1..20: mol_type = other RNA
cctccccaagctcttaggag

SEQ ID NO: 2709 - RNA, 20 nt, synthetic construct
  source 1..20: mol_type = other RNA
cctcccccaacgcctcttca

SEQ ID NO: 2710 - RNA, 20 nt, synthetic construct
  source 1..20: mol_type = other RNA
cctcccccacccccacgagt

SEQ ID NO: 2711 - RNA, 20 nt, synthetic construct
  source 1..20: mol_type = other RNA
cctccccgaggccgagcgcc

SEQ ID NO: 2712 - RNA, 20 nt, synthetic construct
  source 1..20: mol_type = other RNA
cctccccgcctttggctcgc

SEQ ID NO: 2713 - RNA, 20 nt, synthetic construct
  source 1..20: mol_type = other RNA
cctcccctcccaccagagtt

SEQ ID NO: 2714 - RNA, 20 nt, synthetic construct
  source 1..20: mol_type = other RNA
cctcccctggggcccgatcg

SEQ ID NO: 2715 - RNA, 20 nt, synthetic construct
  source 1..20: mol_type = other RNA
cctccccttccttcggggga

SEQ ID NO: 2716 - RNA, 20 nt, synthetic construct
  source 1..20: mol_type = other RNA
cctcccgccgcgccattggc

SEQ ID NO: 2717 - RNA, 20 nt, synthetic construct
  source 1..20: mol_type = other RNA
cctcccgccgtgtgtgaaaa

SEQ ID NO: 2718 - RNA, 20 nt, synthetic construct
  source 1..20: mol_type = other RNA
cctcccgcctgcatccagcc

SEQ ID NO: 2719 - RNA, 20 nt, synthetic construct
  source 1..20: mol_type = other RNA
cctccctcccgcctgcatcc

SEQ ID NO: 2720 - RNA, 20 nt, synthetic construct
  source 1..20: mol_type = other RNA
cctccctctgcgagagcaat

SEQ ID NO: 2721 - RNA, 20 nt, synthetic construct
  source 1..20: mol_type = other RNA
cctccgctcgaaatacacag

SEQ ID NO: 2722 - RNA, 20 nt, synthetic construct
  source 1..20: mol_type = other RNA
cctccgtaatcttcctggac

SEQ ID NO: 2723 - RNA, 20 nt, synthetic construct
  source 1..20: mol_type = other RNA
cctccgtctccccgcgctcg

SEQ ID NO: 2724 - RNA, 20 nt, synthetic construct
  source 1..20: mol_type = other RNA
cctcctaagagcttggggag

SEQ ID NO: 2725 - RNA, 20 nt, synthetic construct
  source 1..20: mol_type = other RNA
cctcctccgtctccccgcgc

SEQ ID NO: 2726 - RNA, 20 nt, synthetic construct
  source 1..20: mol_type = other RNA
cctcctgcggcgggagggga

SEQ ID NO: 2727 - RNA, 20 nt, synthetic construct
  source 1..20: mol_type = other RNA
cctcgccgccttgcacacac

SEQ ID NO: 2728 - RNA, 20 nt, synthetic construct
  source 1..20: mol_type = other RNA
cctcggctaggtaggggagc

SEQ ID NO: 2729 - RNA, 20 nt, synthetic construct
  source 1..20: mol_type = other RNA
cctcggggaggaccgtacca

SEQ ID NO: 2730 - RNA, 20 nt, synthetic construct
  source 1..20: mol_type = other RNA
cctcgttgaatgtgtagggt

SEQ ID NO: 2731 - RNA, 20 nt, synthetic construct
  source 1..20: mol_type = other RNA
cctctaatctaggcgaccca

SEQ ID NO: 2732 - RNA, 20 nt, synthetic construct
  source 1..20: mol_type = other RNA
cctctcatgcgatttaccta

SEQ ID NO: 2733 - RNA, 20 nt, synthetic construct
  source 1..20: mol_type = other RNA
cctctccgcccaccgccccg

SEQ ID NO: 2734 - RNA, 20 nt, synthetic construct
  source 1..20: mol_type = other RNA
cctctcctcaagggaaaggt

SEQ ID NO: 2735 - RNA, 20 nt, synthetic construct
  source 1..20: mol_type = other RNA
cctctcgttttctggcttcc

SEQ ID NO: 2736 - RNA, 20 nt, synthetic construct
  source 1..20: mol_type = other RNA
cctctgcgagagcaatggct

SEQ ID NO: 2737 - RNA, 20 nt, synthetic construct
  source 1..20: mol_type = other RNA
cctctgcgtgtaagtcggga

SEQ ID NO: 2738 - RNA, 20 nt, synthetic construct
  source 1..20: mol_type = other RNA
cctcttcacattcccgactt

SEQ ID NO: 2739 - RNA, 20 nt, synthetic construct
  source 1..20: mol_type = other RNA
cctcttcaccccctttcctg

SEQ ID NO: 2740 - RNA, 20 nt, synthetic construct
  source 1..20: mol_type = other RNA
cctcttctctaggcggcccc

SEQ ID NO: 2741 - RNA, 20 nt, synthetic construct
  source 1..20: mol_type = other RNA
cctcttgctgccctccgctc

SEQ ID NO: 2742 - RNA, 20 nt, synthetic construct
  source 1..20: mol_type = other RNA
cctcttgtcgccgattggcc

SEQ ID NO: 2743 - RNA, 20 nt, synthetic construct
  source 1..20: mol_type = other RNA
cctgaagggcgagacaagcc

SEQ ID NO: 2744 - RNA, 20 nt, synthetic construct
  source 1..20: mol_type = other RNA
cctgacccaggaaaaacatg

SEQ ID NO: 2745 - RNA, 20 nt, synthetic construct
  source 1..20: mol_type = other RNA
cctgattggctgtcgaagct

SEQ ID NO: 2746 - RNA, 20 nt, synthetic construct
  source 1..20: mol_type = other RNA
cctgcatccagccacccctt

SEQ ID NO: 2747 - RNA, 20 nt, synthetic construct
  source 1..20: mol_type = other RNA
cctgcgcaacgtggcaggaa

SEQ ID NO: 2748 - RNA, 20 nt, synthetic construct
  source 1..20: mol_type = other RNA
cctgcgctcagagactcacg

SEQ ID NO: 2749 - RNA, 20 nt, synthetic construct
  source 1..20: mol_type = other RNA
cctgcggcaaccggaggggg

SEQ ID NO: 2750 - RNA, 20 nt, synthetic construct
  source 1..20: mol_type = other RNA
cctgcggcgggaggggaggg

SEQ ID NO: 2751 - RNA, 20 nt, synthetic construct
  source 1..20: mol_type = other RNA
cctgctacaggcactcgtgg

SEQ ID NO: 2752 - RNA, 20 nt, synthetic construct
  source 1..20: mol_type = other RNA
cctgcttgtcttcgacacct

SEQ ID NO: 2753 - RNA, 20 nt, synthetic construct
  source 1..20: mol_type = other RNA
cctggacgccttccctctcg

SEQ ID NO: 2754 - RNA, 20 nt, synthetic construct
  source 1..20: mol_type = other RNA
cctggagttgagccagattg

SEQ ID NO: 2755 - RNA, 20 nt, synthetic construct
  source 1..20: mol_type = other RNA
cctggccctccccaagctct

SEQ ID NO: 2756 - RNA, 20 nt, synthetic construct
  source 1..20: mol_type = other RNA
cctggccgggaatggcccgt

SEQ ID NO: 2757 - RNA, 20 nt, synthetic construct
  source 1..20: mol_type = other RNA
cctggcgccggcgctgggaa

SEQ ID NO: 2758 - RNA, 20 nt, synthetic construct
  source 1..20: mol_type = other RNA
cctgggaaaatggggtgttg

SEQ ID NO: 2759 - RNA, 20 nt, synthetic construct
  source 1..20: mol_type = other RNA
cctgggaactgcctactcca

SEQ ID NO: 2760 - RNA, 20 nt, synthetic construct
  source 1..20: mol_type = other RNA
cctgggacaaggtaagggtc

SEQ ID NO: 2761 - RNA, 20 nt, synthetic construct
  source 1..20: mol_type = other RNA
cctggggcccgatcgtgagg

SEQ ID NO: 2762 - RNA, 20 nt, synthetic construct
  source 1..20: mol_type = other RNA
cctgggtcaggacgcttccc

SEQ ID NO: 2763 - RNA, 20 nt, synthetic construct
  source 1..20: mol_type = other RNA
cctgggtggggcgggtaggt

SEQ ID NO: 2764 - RNA, 20 nt, synthetic construct
  source 1..20: mol_type = other RNA
cctggttcaagtaggtaaat

SEQ ID NO: 2765 - RNA, 20 nt, synthetic construct
  source 1..20: mol_type = other RNA
cctgtagcaggtcgggcttg

SEQ ID NO: 2766 - RNA, 20 nt, synthetic construct
  source 1..20: mol_type = other RNA
cctgtcagttacgccgtcgg

SEQ ID NO: 2767 - RNA, 20 nt, synthetic construct
  source 1..20: mol_type = other RNA
cctgtgtatttcgagcggag

SEQ ID NO: 2768 - RNA, 20 nt, synthetic construct
  source 1..20: mol_type = other RNA
ccttaccttgtcccaggcgc

SEQ ID NO: 2769 - RNA, 20 nt, synthetic construct
  source 1..20: mol_type = other RNA
ccttcaggcggtgggaaccc

SEQ ID NO: 2770 - RNA, 20 nt, synthetic construct
  source 1..20: mol_type = other RNA
ccttccctcccctggggccc

SEQ ID NO: 2771 - RNA, 20 nt, synthetic construct
  source 1..20: mol_type = other RNA
ccttccctctcgttttctgg

SEQ ID NO: 2772 - RNA, 20 nt, synthetic construct
  source 1..20: mol_type = other RNA
ccttccttcgggggagtcgg

SEQ ID NO: 2773 - RNA, 20 nt, synthetic construct
  source 1..20: mol_type = other RNA
ccttcgccacccccaccaca

SEQ ID NO: 2774 - RNA, 20 nt, synthetic construct
  source 1..20: mol_type = other RNA
ccttcgggggagtcggttta

SEQ ID NO: 2775 - RNA, 20 nt, synthetic construct
  source 1..20: mol_type = other RNA
ccttctatgctaattgattc

SEQ ID NO: 2776 - RNA, 20 nt, synthetic construct
  source 1..20: mol_type = other RNA
ccttctccctccccctccgg

SEQ ID NO: 2777 - RNA, 20 nt, synthetic construct
  source 1..20: mol_type = other RNA
ccttgaggagaggcctcttg

SEQ ID NO: 2778 - RNA, 20 nt, synthetic construct
  source 1..20: mol_type = other RNA
ccttgcacacaccgttgcaa

SEQ ID NO: 2779 - RNA, 20 nt, synthetic construct
  source 1..20: mol_type = other RNA
ccttgctactggctcgagtc

SEQ ID NO: 2780 - RNA, 20 nt, synthetic construct
  source 1..20: mol_type = other RNA
ccttgcttgtctcacttctt

SEQ ID NO: 2781 - RNA, 20 nt, synthetic construct
  source 1..20: mol_type = other RNA
ccttgggcgtggagaacgat

SEQ ID NO: 2782 - RNA, 20 nt, synthetic construct
  source 1..20: mol_type = other RNA
ccttgggtcgtgggcctggc

SEQ ID NO: 2783 - RNA, 20 nt, synthetic construct
  source 1..20: mol_type = other RNA
ccttgtcccaggcgctgccg

SEQ ID NO: 2784 - RNA, 20 nt, synthetic construct
  source 1..20: mol_type = other RNA
ccttgtgacagacaactctg

SEQ ID NO: 2785 - RNA, 20 nt, synthetic construct
  source 1..20: mol_type = other RNA
cctttatgaattctctttcc

SEQ ID NO: 2786 - RNA, 20 nt, synthetic construct
  source 1..20: mol_type = other RNA
cctttcatgtttttcctggg

SEQ ID NO: 2787 - RNA, 20 nt, synthetic construct
  source 1..20: mol_type = other RNA
cctttcccgtgggaagtcgg

SEQ ID NO: 2788 - RNA, 20 nt, synthetic construct
  source 1..20: mol_type = other RNA
cctttccctcccaacgtaac

SEQ ID NO: 2789 - RNA, 20 nt, synthetic construct
  source 1..20: mol_type = other RNA
cctttcccttgaggagaggc

SEQ ID NO: 2790 - RNA, 20 nt, synthetic construct
  source 1..20: mol_type = other RNA
cctttcctgggaactgccta

SEQ ID NO: 2791 - RNA, 20 nt, synthetic construct
  source 1..20: mol_type = other RNA
cctttctgccccccaccccc

SEQ ID NO: 2792 - RNA, 20 nt, synthetic construct
  source 1..20: mol_type = other RNA
cctttgaagatattctcaca

SEQ ID NO: 2793 - RNA, 20 nt, synthetic construct
  source 1..20: mol_type = other RNA
cctttggctcgctccgcctt

SEQ ID NO: 2794 - RNA, 20 nt, synthetic construct
  source 1..20: mol_type = other RNA
cctttgggaagcagccatct

SEQ ID NO: 2795 - RNA, 20 nt, synthetic construct
  source 1..20: mol_type = other RNA
cgaaaccactgcgcggggcg

SEQ ID NO: 2796 - RNA, 20 nt, synthetic construct
  source 1..20: mol_type = other RNA
cgaaaccggacggagccatt

SEQ ID NO: 2797 - RNA, 20 nt, synthetic construct
  source 1..20: mol_type = other RNA
cgaaccctacacattcaacg

SEQ ID NO: 2798 - RNA, 20 nt, synthetic construct
  source 1..20: mol_type = other RNA
cgaacctcacgatcgggccc

SEQ ID NO: 2799 - RNA, 20 nt, synthetic construct
  source 1..20: mol_type = other RNA
cgaagacaagcaggcggcgg

SEQ ID NO: 2800 - RNA, 20 nt, synthetic construct
  source 1..20: mol_type = other RNA
cgaagcacagcctcttctct

SEQ ID NO: 2801 - RNA, 20 nt, synthetic construct
  source 1..20: mol_type = other RNA
cgaagctgtgggaccgggcc

SEQ ID NO: 2802 - RNA, 20 nt, synthetic construct
  source 1..20: mol_type = other RNA
cgaaggaaggggagggtggg

SEQ ID NO: 2803 - RNA, 20 nt, synthetic construct
  source 1..20: mol_type = other RNA
cgaaggtaatgcctttggga

SEQ ID NO: 2804 - RNA, 20 nt, synthetic construct
  source 1..20: mol_type = other RNA
cgacaagaggctagccggaa

SEQ ID NO: 2805 - RNA, 20 nt, synthetic construct
  source 1..20: mol_type = other RNA
cgacacaatctggctcaact

SEQ ID NO: 2806 - RNA, 20 nt, synthetic construct
  source 1..20: mol_type = other RNA
cgacacctgattggctgtcg

SEQ ID NO: 2807 - RNA, 20 nt, synthetic construct
  source 1..20: mol_type = other RNA
cgacagaaaagagaccgaac

SEQ ID NO: 2808 - RNA, 20 nt, synthetic construct
  source 1..20: mol_type = other RNA
cgacagccaatcaggtgtcg

SEQ ID NO: 2809 - RNA, 20 nt, synthetic construct
  source 1..20: mol_type = other RNA
cgacccaactccccctttca

SEQ ID NO: 2810 - RNA, 20 nt, synthetic construct
  source 1..20: mol_type = other RNA
cgacccaaggagagcgagcg

SEQ ID NO: 2811 - RNA, 20 nt, synthetic construct
  source 1..20: mol_type = other RNA
cgacctgctacaggcactcg

SEQ ID NO: 2812 - RNA, 20 nt, synthetic construct
  source 1..20: mol_type = other RNA
cgacggcgtaactgacagga

SEQ ID NO: 2813 - RNA, 20 nt, synthetic construct
  source 1..20: mol_type = other RNA
cgactcccccgaaggaaggg

SEQ ID NO: 2814 - RNA, 20 nt, synthetic construct
  source 1..20: mol_type = other RNA
cgactctcgcgttgccccct

SEQ ID NO: 2815 - RNA, 20 nt, synthetic construct
  source 1..20: mol_type = other RNA
cgacttacacgcagagggaa

SEQ ID NO: 2816 - RNA, 20 nt, synthetic construct
  source 1..20: mol_type = other RNA
cgacttcccacgggaaaggc

SEQ ID NO: 2817 - RNA, 20 nt, synthetic construct
  source 1..20: mol_type = other RNA
cgagaacgggggtagggagt

SEQ ID NO: 2818 - RNA, 20 nt, synthetic construct
  source 1..20: mol_type = other RNA
cgagacaagcccgacctgct

SEQ ID NO: 2819 - RNA, 20 nt, synthetic construct
  source 1..20: mol_type = other RNA
cgagacttctggatggcggc

SEQ ID NO: 2820 - RNA, 20 nt, synthetic construct
  source 1..20: mol_type = other RNA
cgagagcaatggctccgtcc

SEQ ID NO: 2821 - RNA, 20 nt, synthetic construct
  source 1..20: mol_type = other RNA
cgagagggaaggcgtccagg

SEQ ID NO: 2822 - RNA, 20 nt, synthetic construct
  source 1..20: mol_type = other RNA
cgagagtcgctaagcggctg

SEQ ID NO: 2823 - RNA, 20 nt, synthetic construct
  source 1..20: mol_type = other RNA
cgagcattttccgctccctt

SEQ ID NO: 2824 - RNA, 20 nt, synthetic construct
  source 1..20: mol_type = other RNA
cgagccagtagcaagggccc

SEQ ID NO: 2825 - RNA, 20 nt, synthetic construct
  source 1..20: mol_type = other RNA
cgagcctggagttgagccag

SEQ ID NO: 2826 - RNA, 20 nt, synthetic construct
  source 1..20: mol_type = other RNA
cgagcgcggggagacggagg

SEQ ID NO: 2827 - RNA, 20 nt, synthetic construct
  source 1..20: mol_type = other RNA
cgagcggaaacgccactgac

SEQ ID NO: 2828 - RNA, 20 nt, synthetic construct
  source 1..20: mol_type = other RNA
cgagcggagggcagcaagag

SEQ ID NO: 2829 - RNA, 20 nt, synthetic construct
  source 1..20: mol_type = other RNA
cgaggccgagcgccgcagtg

SEQ ID NO: 2830 - RNA, 20 nt, synthetic construct
  source 1..20: mol_type = other RNA
cgaggctatctcagacacgc

SEQ ID NO: 2831 - RNA, 20 nt, synthetic construct
  source 1..20: mol_type = other RNA
cgaggctctctgaggagccg

SEQ ID NO: 2832 - RNA, 20 nt, synthetic construct
  source 1..20: mol_type = other RNA
cgaggggggtgagaagtggc

SEQ ID NO: 2833 - RNA, 20 nt, synthetic construct
  source 1..20: mol_type = other RNA
cgagtcctgccgcctcccgg

SEQ ID NO: 2834 - RNA, 20 nt, synthetic construct
  source 1..20: mol_type = other RNA
cgagtctcacatgagcgaaa

SEQ ID NO: 2835 - RNA, 20 nt, synthetic construct
  source 1..20: mol_type = other RNA
cgagtgcctgtagcaggtcg

SEQ ID NO: 2836 - RNA, 20 nt, synthetic construct
  source 1..20: mol_type = other RNA
cgagtgggccaatgggtgcg

SEQ ID NO: 2837 - RNA, 20 nt, synthetic construct
  source 1..20: mol_type = other RNA
cgagttaggcccaacgcggc

SEQ ID NO: 2838 - RNA, 20 nt, synthetic construct
  source 1..20: mol_type = other RNA
cgatcagagttgtctgtcac

SEQ ID NO: 2839 - RNA, 20 nt, synthetic construct
  source 1..20: mol_type = other RNA
cgatcccccactccctaccc

SEQ ID NO: 2840 - RNA, 20 nt, synthetic construct
  source 1..20: mol_type = other RNA
cgatcgggccccaggggagg

SEQ ID NO: 2841 - RNA, 20 nt, synthetic construct
  source 1..20: mol_type = other RNA
cgatcgtgaggttcggtctc

SEQ ID NO: 2842 - RNA, 20 nt, synthetic construct
  source 1..20: mol_type = other RNA
cgatctcccctccgtaatct

SEQ ID NO: 2843 - RNA, 20 nt, synthetic construct
  source 1..20: mol_type = other RNA
cgatcttgtgagaatatctt

SEQ ID NO: 2844 - RNA, 20 nt, synthetic construct
  source 1..20: mol_type = other RNA
cgattggccgtttctcctcc

SEQ ID NO: 2845 - RNA, 20 nt, synthetic construct
  source 1..20: mol_type = other RNA
cgatttacctacttgaacca

SEQ ID NO: 2846 - RNA, 20 nt, synthetic construct
  source 1..20: mol_type = other RNA
cgatttcactgaccctcccc

SEQ ID NO: 2847 - RNA, 20 nt, synthetic construct
  source 1..20: mol_type = other RNA
cgcaacgtggcaggaagcgc

SEQ ID NO: 2848 - RNA, 20 nt, synthetic construct
  source 1..20: mol_type = other RNA
cgcaagccaccagacggccc

SEQ ID NO: 2849 - RNA, 20 nt, synthetic construct
  source 1..20: mol_type = other RNA
cgcacacccagcatctctac

SEQ ID NO: 2850 - RNA, 20 nt, synthetic construct
  source 1..20: mol_type = other RNA
cgcacccattggcccactcg

SEQ ID NO: 2851 - RNA, 20 nt, synthetic construct
  source 1..20: mol_type = other RNA
cgcacctcccctcccaccag

SEQ ID NO: 2852 - RNA, 20 nt, synthetic construct
  source 1..20: mol_type = other RNA
cgcacggcactcccgggagg

SEQ ID NO: 2853 - RNA, 20 nt, synthetic construct
  source 1..20: mol_type = other RNA
cgcacggggattcccagcgc

SEQ ID NO: 2854 - RNA, 20 nt, synthetic construct
  source 1..20: mol_type = other RNA
cgcagagggaaagagaattc

SEQ ID NO: 2855 - RNA, 20 nt, synthetic construct
  source 1..20: mol_type = other RNA
cgcagagggaggagcgcttc

SEQ ID NO: 2856 - RNA, 20 nt, synthetic construct
  source 1..20: mol_type = other RNA
cgcagccccagtcccgccag

SEQ ID NO: 2857 - RNA, 20 nt, synthetic construct
  source 1..20: mol_type = other RNA
cgcagccgcttagcgactct

SEQ ID NO: 2858 - RNA, 20 nt, synthetic construct
  source 1..20: mol_type = other RNA
cgcagtggtttcgctcatgt

SEQ ID NO: 2859 - RNA, 20 nt, synthetic construct
  source 1..20: mol_type = other RNA
cgcatgagagggaaagttaa

SEQ ID NO: 2860 - RNA, 20 nt, synthetic construct
  source 1..20: mol_type = other RNA
cgccaacacagtagtgccgg

SEQ ID NO: 2861 - RNA, 20 nt, synthetic construct
  source 1..20: mol_type = other RNA
cgccaatcagcggaagccgc

SEQ ID NO: 2862 - RNA, 20 nt, synthetic construct
  source 1..20: mol_type = other RNA
cgccacccccaccacacgtt

SEQ ID NO: 2863 - RNA, 20 nt, synthetic construct
  source 1..20: mol_type = other RNA
cgccacggcgtttcctggcc

SEQ ID NO: 2864 - RNA, 20 nt, synthetic construct
  source 1..20: mol_type = other RNA
cgccacggggagccagagaa

SEQ ID NO: 2865 - RNA, 20 nt, synthetic construct
  source 1..20: mol_type = other RNA
cgccactgaccgcacgggga

SEQ ID NO: 2866 - RNA, 20 nt, synthetic construct
  source 1..20: mol_type = other RNA
cgccagagccgatttcactg

SEQ ID NO: 2867 - RNA, 20 nt, synthetic construct
  source 1..20: mol_type = other RNA
cgccagtccgccaacacagt

SEQ ID NO: 2868 - RNA, 20 nt, synthetic construct
  source 1..20: mol_type = other RNA
cgccatccagaagtctcggc

SEQ ID NO: 2869 - RNA, 20 nt, synthetic construct
  source 1..20: mol_type = other RNA
cgccattggcctctccgccc

SEQ ID NO: 2870 - RNA, 20 nt, synthetic construct
  source 1..20: mol_type = other RNA
cgccatttgtgttttcacac

SEQ ID NO: 2871 - RNA, 20 nt, synthetic construct
  source 1..20: mol_type = other RNA
cgcccaagaagtgagacaag

SEQ ID NO: 2872 - RNA, 20 nt, synthetic construct
  source 1..20: mol_type = other RNA
cgcccaaggcaagtaaaacg

SEQ ID NO: 2873 - RNA, 20 nt, synthetic construct
  source 1..20: mol_type = other RNA
cgcccaccgccccgcaccca

SEQ ID NO: 2874 - RNA, 20 nt, synthetic construct
  source 1..20: mol_type = other RNA
cgccccacccagggggcaac

SEQ ID NO: 2875 - RNA, 20 nt, synthetic construct
  source 1..20: mol_type = other RNA
cgccccgcacccattggccc

SEQ ID NO: 2876 - RNA, 20 nt, synthetic construct
  source 1..20: mol_type = other RNA
cgccccgcgcagtggtttcg

SEQ ID NO: 2877 - RNA, 20 nt, synthetic construct
  source 1..20: mol_type = other RNA
cgccccgggttcccaccgcc

SEQ ID NO: 2878 - RNA, 20 nt, synthetic construct
  source 1..20: mol_type = other RNA
cgcccctgcgcaacgtggca

SEQ ID NO: 2879 - RNA, 20 nt, synthetic construct
  source 1..20: mol_type = other RNA
cgcccgcacacccagcatct

SEQ ID NO: 2880 - RNA, 20 nt, synthetic construct
  source 1..20: mol_type = other RNA
cgcccgcctgcgctcagaga

SEQ ID NO: 2881 - RNA, 20 nt, synthetic construct
  source 1..20: mol_type = other RNA
cgcccgcgccagagccgatt

SEQ ID NO: 2882 - RNA, 20 nt, synthetic construct
  source 1..20: mol_type = other RNA
cgccctgcggcaaccggagg

SEQ ID NO: 2883 - RNA, 20 nt, synthetic construct
  source 1..20: mol_type = other RNA
cgcccttcaggcggtgggaa

SEQ ID NO: 2884 - RNA, 20 nt, synthetic construct
  source 1..20: mol_type = other RNA
cgccgaagcacagcctcttc

SEQ ID NO: 2885 - RNA, 20 nt, synthetic construct
  source 1..20: mol_type = other RNA
cgccgattggccgtttctcc

SEQ ID NO: 2886 - RNA, 20 nt, synthetic construct
  source 1..20: mol_type = other RNA
cgccgccaatcagcggaagc

SEQ ID NO: 2887 - RNA, 20 nt, synthetic construct
  source 1..20: mol_type = other RNA
cgccgccatccagaagtctc

SEQ ID NO: 2888 - RNA, 20 nt, synthetic construct
  source 1..20: mol_type = other RNA
cgccgcccgcctgcgctcag

SEQ ID NO: 2889 - RNA, 20 nt, synthetic construct
  source 1..20: mol_type = other RNA
cgccgcctgcttgtcttcga

SEQ ID NO: 2890 - RNA, 20 nt, synthetic construct
  source 1..20: mol_type = other RNA
cgccgccttgcacacaccgt

SEQ ID NO: 2891 - RNA, 20 nt, synthetic construct
  source 1..20: mol_type = other RNA
cgccgcgccattggcctctc

SEQ ID NO: 2892 - RNA, 20 nt, synthetic construct
  source 1..20: mol_type = other RNA
cgccgcgttgggcctaactc

SEQ ID NO: 2893 - RNA, 20 nt, synthetic construct
  source 1..20: mol_type = other RNA
cgccggcgctgggaatcccc

SEQ ID NO: 2894 - RNA, 20 nt, synthetic construct
  source 1..20: mol_type = other RNA
cgccggggccgcctagagaa

SEQ ID NO: 2895 - RNA, 20 nt, synthetic construct
  source 1..20: mol_type = other RNA
cgccgtcgggagtacgcagc

SEQ ID NO: 2896 - RNA, 20 nt, synthetic construct
  source 1..20: mol_type = other RNA
cgccgtggcgccgcgttggg

SEQ ID NO: 2897 - RNA, 20 nt, synthetic construct
  source 1..20: mol_type = other RNA
cgccgtgtgtgaaaacacaa

SEQ ID NO: 2898 - RNA, 20 nt, synthetic construct
  source 1..20: mol_type = other RNA
cgcctagagaagaggctgtg

SEQ ID NO: 2899 - RNA, 20 nt, synthetic construct
  source 1..20: mol_type = other RNA
cgcctagattagagggggat

SEQ ID NO: 2900 - RNA, 20 nt, synthetic construct
  source 1..20: mol_type = other RNA
cgcctccagcgcgcgcttcc

SEQ ID NO: 2901 - RNA, 20 nt, synthetic construct
  source 1..20: mol_type = other RNA
cgcctcttcaccccctttcc

SEQ ID NO: 2902 - RNA, 20 nt, synthetic construct
  source 1..20: mol_type = other RNA
cgcctgaagggcgagacaag

SEQ ID NO: 2903 - RNA, 20 nt, synthetic construct
  source 1..20: mol_type = other RNA
cgcctgcatccagccacccc

SEQ ID NO: 2904 - RNA, 20 nt, synthetic construct
  source 1..20: mol_type = other RNA
cgcctgcgctcagagactca

SEQ ID NO: 2905 - RNA, 20 nt, synthetic construct
  source 1..20: mol_type = other RNA
cgcctgcttgtcttcgacac

SEQ ID NO: 2906 - RNA, 20 nt, synthetic construct
  source 1..20: mol_type = other RNA
cgcctgggacaaggtaaggg

SEQ ID NO: 2907 - RNA, 20 nt, synthetic construct
  source 1..20: mol_type = other RNA
cgccttccctctcgttttct

SEQ ID NO: 2908 - RNA, 20 nt, synthetic construct
  source 1..20: mol_type = other RNA
cgccttgcacacaccgttgc

SEQ ID NO: 2909 - RNA, 20 nt, synthetic construct
  source 1..20: mol_type = other RNA
cgcctttctgccccccaccc

SEQ ID NO: 2910 - RNA, 20 nt, synthetic construct
  source 1..20: mol_type = other RNA
cgcctttggctcgctccgcc

SEQ ID NO: 2911 - RNA, 20 nt, synthetic construct
  source 1..20: mol_type = other RNA
cgcgagaacgggggtaggga

SEQ ID NO: 2912 - RNA, 20 nt, synthetic construct
  source 1..20: mol_type = other RNA
cgcgagagtcgctaagcggc

SEQ ID NO: 2913 - RNA, 20 nt, synthetic construct
  source 1..20: mol_type = other RNA
cgcgatctcccctccgtaat

SEQ ID NO: 2914 - RNA, 20 nt, synthetic construct
  source 1..20: mol_type = other RNA
cgcgcagtggtttcgctcat

SEQ ID NO: 2915 - RNA, 20 nt, synthetic construct
  source 1..20: mol_type = other RNA
cgcgccagagccgatttcac

SEQ ID NO: 2916 - RNA, 20 nt, synthetic construct
  source 1..20: mol_type = other RNA
cgcgccattggcctctccgc

SEQ ID NO: 2917 - RNA, 20 nt, synthetic construct
  source 1..20: mol_type = other RNA
cgcgccccgcgcagtggttt

SEQ ID NO: 2918 - RNA, 20 nt, synthetic construct
  source 1..20: mol_type = other RNA
cgcgcccctgcgcaacgtgg

SEQ ID NO: 2919 - RNA, 20 nt, synthetic construct
  source 1..20: mol_type = other RNA
cgcgcccgcacacccagcat

SEQ ID NO: 2920 - RNA, 20 nt, synthetic construct
  source 1..20: mol_type = other RNA
cgcgcgcttcctgccacgtt

SEQ ID NO: 2921 - RNA, 20 nt, synthetic construct
  source 1..20: mol_type = other RNA
cgcgctcgctctccttgggt

SEQ ID NO: 2922 - RNA, 20 nt, synthetic construct
  source 1..20: mol_type = other RNA
cgcgcttcctgccacgttgc

SEQ ID NO: 2923 - RNA, 20 nt, synthetic construct
  source 1..20: mol_type = other RNA
cgcggcccccagagcgatca

SEQ ID NO: 2924 - RNA, 20 nt, synthetic construct
  source 1..20: mol_type = other RNA
cgcggccgccgccatccaga

SEQ ID NO: 2925 - RNA, 20 nt, synthetic construct
  source 1..20: mol_type = other RNA
cgcggccttgtgacagacaa

SEQ ID NO: 2926 - RNA, 20 nt, synthetic construct
  source 1..20: mol_type = other RNA
cgcgggcgtcctcccaccct

SEQ ID NO: 2927 - RNA, 20 nt, synthetic construct
  source 1..20: mol_type = other RNA
cgcggggagacggaggaggt

SEQ ID NO: 2928 - RNA, 20 nt, synthetic construct
  source 1..20: mol_type = other RNA
cgcgttgccccctgggtggg

SEQ ID NO: 2929 - RNA, 20 nt, synthetic construct
  source 1..20: mol_type = other RNA
cgcgttgggcctaactcgag

SEQ ID NO: 2930 - RNA, 20 nt, synthetic construct
  source 1..20: mol_type = other RNA
cgctaagcggctgcgtactc

SEQ ID NO: 2931 - RNA, 20 nt, synthetic construct
  source 1..20: mol_type = other RNA
cgctcagagactcacgcagc

SEQ ID NO: 2932 - RNA, 20 nt, synthetic construct
  source 1..20: mol_type = other RNA
cgctcatgtgagactcgagc

SEQ ID NO: 2933 - RNA, 20 nt, synthetic construct
  source 1..20: mol_type = other RNA
cgctcccctacctagccgag

SEQ ID NO: 2934 - RNA, 20 nt, synthetic construct
  source 1..20: mol_type = other RNA
cgctcccttctccctccccc

SEQ ID NO: 2935 - RNA, 20 nt, synthetic construct
  source 1..20: mol_type = other RNA
cgctccgcctttctgccccc

SEQ ID NO: 2936 - RNA, 20 nt, synthetic construct
  source 1..20: mol_type = other RNA
cgctccggctcctcagagag

SEQ ID NO: 2937 - RNA, 20 nt, synthetic construct
  source 1..20: mol_type = other RNA
cgctcctcccccacccccac

SEQ ID NO: 2938 - RNA, 20 nt, synthetic construct
  source 1..20: mol_type = other RNA
cgctcctccctctgcgagag

SEQ ID NO: 2939 - RNA, 20 nt, synthetic construct
  source 1..20: mol_type = other RNA
cgctcgaaatacacaggcat

SEQ ID NO: 2940 - RNA, 20 nt, synthetic construct
  source 1..20: mol_type = other RNA
cgctcgctctccttgggtcg

SEQ ID NO: 2941 - RNA, 20 nt, synthetic construct
  source 1..20: mol_type = other RNA
cgctcggcctcggggaggac

SEQ ID NO: 2942 - RNA, 20 nt, synthetic construct
  source 1..20: mol_type = other RNA
cgctcgggcagcgggctgag

SEQ ID NO: 2943 - RNA, 20 nt, synthetic construct
  source 1..20: mol_type = other RNA
cgctctccttgggtcgtggg

SEQ ID NO: 2944 - RNA, 20 nt, synthetic construct
  source 1..20: mol_type = other RNA
cgctctgggggccgcgatct

SEQ ID NO: 2945 - RNA, 20 nt, synthetic construct
  source 1..20: mol_type = other RNA
cgctgattggcggcgagtgg

SEQ ID NO: 2946 - RNA, 20 nt, synthetic construct
  source 1..20: mol_type = other RNA
cgctgcccgagcggaaacgc

SEQ ID NO: 2947 - RNA, 20 nt, synthetic construct
  source 1..20: mol_type = other RNA
cgctgggaatccccgtgcgg

SEQ ID NO: 2948 - RNA, 20 nt, synthetic construct
  source 1..20: mol_type = other RNA
cgctgtggcacacgccacgg

SEQ ID NO: 2949 - RNA, 20 nt, synthetic construct
  source 1..20: mol_type = other RNA
cgcttagcgactctcgcgtt

SEQ ID NO: 2950 - RNA, 20 nt, synthetic construct
  source 1..20: mol_type = other RNA
cgcttcccctcccccaacgc

SEQ ID NO: 2951 - RNA, 20 nt, synthetic construct
  source 1..20: mol_type = other RNA
cgcttccggctagcctcttg

SEQ ID NO: 2952 - RNA, 20 nt, synthetic construct
  source 1..20: mol_type = other RNA
cgcttcctgccacgttgcgc

SEQ ID NO: 2953 - RNA, 20 nt, synthetic construct
  source 1..20: mol_type = other RNA
cggaaaatgctcgaaaccgg

SEQ ID NO: 2954 - RNA, 20 nt, synthetic construct
  source 1..20: mol_type = other RNA
cggaaacgccactgaccgca

SEQ ID NO: 2955 - RNA, 20 nt, synthetic construct
  source 1..20: mol_type = other RNA
cggaactctggtgggagggg

SEQ ID NO: 2956 - RNA, 20 nt, synthetic construct
  source 1..20: mol_type = other RNA
cggaagccgccggggccgcc

SEQ ID NO: 2957 - RNA, 20 nt, synthetic construct
  source 1..20: mol_type = other RNA
cggaagcgctcctccctctg

SEQ ID NO: 2958 - RNA, 20 nt, synthetic construct
  source 1..20: mol_type = other RNA
cggacccttaccttgtccca

SEQ ID NO: 2959 - RNA, 20 nt, synthetic construct
  source 1..20: mol_type = other RNA
cggacggagccattgctctc

SEQ ID NO: 2960 - RNA, 20 nt, synthetic construct
  source 1..20: mol_type = other RNA
cggactggcgggactggggc

SEQ ID NO: 2961 - RNA, 20 nt, synthetic construct
  source 1..20: mol_type = other RNA
cggagaggccaatggcgcgg

SEQ ID NO: 2962 - RNA, 20 nt, synthetic construct
  source 1..20: mol_type = other RNA
cggagccattgctctcgcag

SEQ ID NO: 2963 - RNA, 20 nt, synthetic construct
  source 1..20: mol_type = other RNA
cggagccgcggccgccgcca

SEQ ID NO: 2964 - RNA, 20 nt, synthetic construct
  source 1..20: mol_type = other RNA
cggagcgagccaaaggcggg

SEQ ID NO: 2965 - RNA, 20 nt, synthetic construct
  source 1..20: mol_type = other RNA
cggagcgccgaagcacagcc

SEQ ID NO: 2966 - RNA, 20 nt, synthetic construct
  source 1..20: mol_type = other RNA
cggaggaggtgacccttccc

SEQ ID NO: 2967 - RNA, 20 nt, synthetic construct
  source 1..20: mol_type = other RNA
cggagggcagcaagaggcct

SEQ ID NO: 2968 - RNA, 20 nt, synthetic construct
  source 1..20: mol_type = other RNA
cggaggggagatcgcggccc

SEQ ID NO: 2969 - RNA, 20 nt, synthetic construct
  source 1..20: mol_type = other RNA
cggagggggagggagaaggg

SEQ ID NO: 2970 - RNA, 20 nt, synthetic construct
  source 1..20: mol_type = other RNA
cggcaaccggagggggaggg

SEQ ID NO: 2971 - RNA, 20 nt, synthetic construct
  source 1..20: mol_type = other RNA
cggcactactgtgttggcgg

SEQ ID NO: 2972 - RNA, 20 nt, synthetic construct
  source 1..20: mol_type = other RNA
cggcactcccgggaggcggc

SEQ ID NO: 2973 - RNA, 20 nt, synthetic construct
  source 1..20: mol_type = other RNA
cggcagcgcctgggacaagg

SEQ ID NO: 2974 - RNA, 20 nt, synthetic construct
  source 1..20: mol_type = other RNA
cggcagctcactcagcccgc

SEQ ID NO: 2975 - RNA, 20 nt, synthetic construct
  source 1..20: mol_type = other RNA
cggcaggactcgagttaggc

SEQ ID NO: 2976 - RNA, 20 nt, synthetic construct
  source 1..20: mol_type = other RNA
cggccaatcggcgacaagag

SEQ ID NO: 2977 - RNA, 20 nt, synthetic construct
  source 1..20: mol_type = other RNA
cggccaggaaacgccgtggc

SEQ ID NO: 2978 - RNA, 20 nt, synthetic construct
  source 1..20: mol_type = other RNA
cggcccccagagcgatcaga

SEQ ID NO: 2979 - RNA, 20 nt, synthetic construct
  source 1..20: mol_type = other RNA
cggcccccctagccacccat

SEQ ID NO: 2980 - RNA, 20 nt, synthetic construct
  source 1..20: mol_type = other RNA
cggcccccctctttccctgg

SEQ ID NO: 2981 - RNA, 20 nt, synthetic construct
  source 1..20: mol_type = other RNA
cggccccggcggcttccgct

SEQ ID NO: 2982 - RNA, 20 nt, synthetic construct
  source 1..20: mol_type = other RNA
cggccgagacttctggatgg

SEQ ID NO: 2983 - RNA, 20 nt, synthetic construct
  source 1..20: mol_type = other RNA
cggccgccgccatccagaag

SEQ ID NO: 2984 - RNA, 20 nt, synthetic construct
  source 1..20: mol_type = other RNA
cggccgcgcccgcacaccca

SEQ ID NO: 2985 - RNA, 20 nt, synthetic construct
  source 1..20: mol_type = other RNA
cggcctcggggaggaccgta

SEQ ID NO: 2986 - RNA, 20 nt, synthetic construct
  source 1..20: mol_type = other RNA
cggccttgtgacagacaact

SEQ ID NO: 2987 - RNA, 20 nt, synthetic construct
  source 1..20: mol_type = other RNA
cggcgacaagaggctagccg

SEQ ID NO: 2988 - RNA, 20 nt, synthetic construct
  source 1..20: mol_type = other RNA
cggcgaggggggtgagaagt

SEQ ID NO: 2989 - RNA, 20 nt, synthetic construct
  source 1..20: mol_type = other RNA
cggcgagtgggccaatgggt

SEQ ID NO: 2990 - RNA, 20 nt, synthetic construct
  source 1..20: mol_type = other RNA
cggcgccacggcgtttcctg

SEQ ID NO: 2991 - RNA, 20 nt, synthetic construct
  source 1..20: mol_type = other RNA
cggcgctccggctcctcaga

SEQ ID NO: 2992 - RNA, 20 nt, synthetic construct
  source 1..20: mol_type = other RNA
cggcgctcggcctcggggag

SEQ ID NO: 2993 - RNA, 20 nt, synthetic construct
  source 1..20: mol_type = other RNA
cggcgctgggaatccccgtg

SEQ ID NO: 2994 - RNA, 20 nt, synthetic construct
  source 1..20: mol_type = other RNA
cggcggcagctcactcagcc

SEQ ID NO: 2995 - RNA, 20 nt, synthetic construct
  source 1..20: mol_type = other RNA
cggcggcggcagctcactca

SEQ ID NO: 2996 - RNA, 20 nt, synthetic construct
  source 1..20: mol_type = other RNA
cggcggcttccgctgattgg

SEQ ID NO: 2997 - RNA, 20 nt, synthetic construct
  source 1..20: mol_type = other RNA
cggcgggaggagaaacggcc

SEQ ID NO: 2998 - RNA, 20 nt, synthetic construct
  source 1..20: mol_type = other RNA
cggcgggaggggagggtcag

SEQ ID NO: 2999 - RNA, 20 nt, synthetic construct
  source 1..20: mol_type = other RNA
cggcgggtaaaccgactccc

SEQ ID NO: 3000 - RNA, 20 nt, synthetic construct
  source 1..20: mol_type = other RNA
cggcgtaactgacaggagct

SEQ ID NO: 3001 - RNA, 20 nt, synthetic construct
  source 1..20: mol_type = other RNA
cggcgtttcctggccgggaa

SEQ ID NO: 3002 - RNA, 20 nt, synthetic construct
  source 1..20: mol_type = other RNA
cggctagcctcttgtcgccg

SEQ ID NO: 3003 - RNA, 20 nt, synthetic construct
  source 1..20: mol_type = other RNA
cggctaggtaggggagcgga

SEQ ID NO: 3004 - RNA, 20 nt, synthetic construct
  source 1..20: mol_type = other RNA
cggctcctcagagagcctcg

SEQ ID NO: 3005 - RNA, 20 nt, synthetic construct
  source 1..20: mol_type = other RNA
cggctgcgtactcccgacgg

SEQ ID NO: 3006 - RNA, 20 nt, synthetic construct
  source 1..20: mol_type = other RNA
cggcttccgctgattggcgg

SEQ ID NO: 3007 - RNA, 20 nt, synthetic construct
  source 1..20: mol_type = other RNA
cgggaaaggcaacccccgca

SEQ ID NO: 3008 - RNA, 20 nt, synthetic construct
  source 1..20: mol_type = other RNA
cgggaacataatgtttgtta

SEQ ID NO: 3009 - RNA, 20 nt, synthetic construct
  source 1..20: mol_type = other RNA
cgggaatggcccgtacccgt

SEQ ID NO: 3010 - RNA, 20 nt, synthetic construct
  source 1..20: mol_type = other RNA
cgggaatgtgaagaggagtg

SEQ ID NO: 3011 - RNA, 20 nt, synthetic construct
  source 1..20: mol_type = other RNA
cgggactggggctgcgtgag

SEQ ID NO: 3012 - RNA, 20 nt, synthetic construct
  source 1..20: mol_type = other RNA
cgggaggagaaacggccaat

SEQ ID NO: 3013 - RNA, 20 nt, synthetic construct
  source 1..20: mol_type = other RNA
cgggaggcggcaggactcga

SEQ ID NO: 3014 - RNA, 20 nt, synthetic construct
  source 1..20: mol_type = other RNA
cgggaggggagggtcagtga

SEQ ID NO: 3015 - RNA, 20 nt, synthetic construct
  source 1..20: mol_type = other RNA
cgggagtacgcagccgctta

SEQ ID NO: 3016 - RNA, 20 nt, synthetic construct
  source 1..20: mol_type = other RNA
cgggcagcgggctgagtgag

SEQ ID NO: 3017 - RNA, 20 nt, synthetic construct
  source 1..20: mol_type = other RNA
cgggccattcccggccagga

SEQ ID NO: 3018 - RNA, 20 nt, synthetic construct
  source 1..20: mol_type = other RNA
cgggccccaggggagggaag

SEQ ID NO: 3019 - RNA, 20 nt, synthetic construct
  source 1..20: mol_type = other RNA
cgggcccttgctactggctc

SEQ ID NO: 3020 - RNA, 20 nt, synthetic construct
  source 1..20: mol_type = other RNA
cgggcctccctcccgcctgc

SEQ ID NO: 3021 - RNA, 20 nt, synthetic construct
  source 1..20: mol_type = other RNA
cgggcgtcctcccaccctcc

SEQ ID NO: 3022 - RNA, 20 nt, synthetic construct
  source 1..20: mol_type = other RNA
cgggcgttggtacggtcctc

SEQ ID NO: 3023 - RNA, 20 nt, synthetic construct
  source 1..20: mol_type = other RNA
cgggctgccggccgagactt

SEQ ID NO: 3024 - RNA, 20 nt, synthetic construct
  source 1..20: mol_type = other RNA
cgggcttgtctcgcccttca

SEQ ID NO: 3025 - RNA, 20 nt, synthetic construct
  source 1..20: mol_type = other RNA
cggggagacggaggaggtga

SEQ ID NO: 3026 - RNA, 20 nt, synthetic construct
  source 1..20: mol_type = other RNA
cggggagccagagaacgtgt

SEQ ID NO: 3027 - RNA, 20 nt, synthetic construct
  source 1..20: mol_type = other RNA
cggggaggaccgtaccaacg

SEQ ID NO: 3028 - RNA, 20 nt, synthetic construct
  source 1..20: mol_type = other RNA
cggggaggcgggcgttggta

SEQ ID NO: 3029 - RNA, 20 nt, synthetic construct
  source 1..20: mol_type = other RNA
cggggccagacactgcggcg

SEQ ID NO: 3030 - RNA, 20 nt, synthetic construct
  source 1..20: mol_type = other RNA
cggggccgcctagagaagag

SEQ ID NO: 3031 - RNA, 20 nt, synthetic construct
  source 1..20: mol_type = other RNA
cggggcggtgggcggagagg

SEQ ID NO: 3032 - RNA, 20 nt, synthetic construct
  source 1..20: mol_type = other RNA
cgggggagtcggtttacccg

SEQ ID NO: 3033 - RNA, 20 nt, synthetic construct
  source 1..20: mol_type = other RNA
cgggggcgggctgccggccg

SEQ ID NO: 3034 - RNA, 20 nt, synthetic construct
  source 1..20: mol_type = other RNA
cgggggtagggagtggggga

SEQ ID NO: 3035 - RNA, 20 nt, synthetic construct
  source 1..20: mol_type = other RNA
cgggggttgcctttcccgtg

SEQ ID NO: 3036 - RNA, 20 nt, synthetic construct
  source 1..20: mol_type = other RNA
cgggtaaaccgactcccccg

SEQ ID NO: 3037 - RNA, 20 nt, synthetic construct
  source 1..20: mol_type = other RNA
cgggtacgggccattcccgg

SEQ ID NO: 3038 - RNA, 20 nt, synthetic construct
  source 1..20: mol_type = other RNA
cgggtaggtaggtggggtgt

SEQ ID NO: 3039 - RNA, 20 nt, synthetic construct
  source 1..20: mol_type = other RNA
cgggttcccaccgcctgaag

SEQ ID NO: 3040 - RNA, 20 nt, synthetic construct
  source 1..20: mol_type = other RNA
cggtacactggggggatggg

SEQ ID NO: 3041 - RNA, 20 nt, synthetic construct
  source 1..20: mol_type = other RNA
cggtcagtggcgtttccgct

SEQ ID NO: 3042 - RNA, 20 nt, synthetic construct
  source 1..20: mol_type = other RNA
cggtcccacagcttcgacag

SEQ ID NO: 3043 - RNA, 20 nt, synthetic construct
  source 1..20: mol_type = other RNA
cggtctcttttctgtcggac

SEQ ID NO: 3044 - RNA, 20 nt, synthetic construct
  source 1..20: mol_type = other RNA
cggtgggcggagaggccaat

SEQ ID NO: 3045 - RNA, 20 nt, synthetic construct
  source 1..20: mol_type = other RNA
cggtgtgtgcaaggcggcga

SEQ ID NO: 3046 - RNA, 20 nt, synthetic construct
  source 1..20: mol_type = other RNA
cggtttacccgccgcctgct

SEQ ID NO: 3047 - RNA, 20 nt, synthetic construct
  source 1..20: mol_type = other RNA
cggtttcgagcattttccgc

SEQ ID NO: 3048 - RNA, 20 nt, synthetic construct
  source 1..20: mol_type = other RNA
cgtaacaaacattatgttcc

SEQ ID NO: 3049 - RNA, 20 nt, synthetic construct
  source 1..20: mol_type = other RNA
cgtaactgacaggagcttta

SEQ ID NO: 3050 - RNA, 20 nt, synthetic construct
  source 1..20: mol_type = other RNA
cgtaatcttcctggacgcct

SEQ ID NO: 3051 - RNA, 20 nt, synthetic construct
  source 1..20: mol_type = other RNA
cgtaccaacgcccgcctccc

SEQ ID NO: 3052 - RNA, 20 nt, synthetic construct
  source 1..20: mol_type = other RNA
cgtacccgtgaggtgggggt

SEQ ID NO: 3053 - RNA, 20 nt, synthetic construct
  source 1..20: mol_type = other RNA
cgtactcccgacggcgtaac

SEQ ID NO: 3054 - RNA, 20 nt, synthetic construct
  source 1..20: mol_type = other RNA
cgtattctggttggagtaaa

SEQ ID NO: 3055 - RNA, 20 nt, synthetic construct
  source 1..20: mol_type = other RNA
cgtcagtggtctttctcttg

SEQ ID NO: 3056 - RNA, 20 nt, synthetic construct
  source 1..20: mol_type = other RNA
cgtccaggaagattacggag

SEQ ID NO: 3057 - RNA, 20 nt, synthetic construct
  source 1..20: mol_type = other RNA
cgtccggtttcgagcatttt

SEQ ID NO: 3058 - RNA, 20 nt, synthetic construct
  source 1..20: mol_type = other RNA
cgtcctcccaccctcccctt

SEQ ID NO: 3059 - RNA, 20 nt, synthetic construct
  source 1..20: mol_type = other RNA
cgtcctgacccaggaaaaac

SEQ ID NO: 3060 - RNA, 20 nt, synthetic construct
  source 1..20: mol_type = other RNA
cgtcgggagtacgcagccgc

SEQ ID NO: 3061 - RNA, 20 nt, synthetic construct
  source 1..20: mol_type = other RNA
cgtctccccgcgctcgctct

SEQ ID NO: 3062 - RNA, 20 nt, synthetic construct
  source 1..20: mol_type = other RNA
cgtctggtggcttgcggggg

SEQ ID NO: 3063 - RNA, 20 nt, synthetic construct
  source 1..20: mol_type = other RNA
cgtgaggtgggggtgggggg

SEQ ID NO: 3064 - RNA, 20 nt, synthetic construct
  source 1..20: mol_type = other RNA
cgtgaggttcggtctctttt

SEQ ID NO: 3065 - RNA, 20 nt, synthetic construct
  source 1..20: mol_type = other RNA
cgtgagtctctgagcgcagg

SEQ ID NO: 3066 - RNA, 20 nt, synthetic construct
  source 1..20: mol_type = other RNA
cgtgcggtcagtggcgtttc

SEQ ID NO: 3067 - RNA, 20 nt, synthetic construct
  source 1..20: mol_type = other RNA
cgtggagaacgatcttgtga

SEQ ID NO: 3068 - RNA, 20 nt, synthetic construct
  source 1..20: mol_type = other RNA
cgtggagtaggcagttccca

SEQ ID NO: 3069 - RNA, 20 nt, synthetic construct
  source 1..20: mol_type = other RNA
cgtggcaggaagcgcgcgct

SEQ ID NO: 3070 - RNA, 20 nt, synthetic construct
  source 1..20: mol_type = other RNA
cgtggcgccgcgttgggcct

SEQ ID NO: 3071 - RNA, 20 nt, synthetic construct
  source 1..20: mol_type = other RNA
cgtggcgtgtgccacagcgt

SEQ ID NO: 3072 - RNA, 20 nt, synthetic construct
  source 1..20: mol_type = other RNA
cgtgggaagtcgggaacata

SEQ ID NO: 3073 - RNA, 20 nt, synthetic construct
  source 1..20: mol_type = other RNA
cgtgggcctggccctcccca

SEQ ID NO: 3074 - RNA, 20 nt, synthetic construct
  source 1..20: mol_type = other RNA
cgtgtaagtcgggaatgtga

SEQ ID NO: 3075 - RNA, 20 nt, synthetic construct
  source 1..20: mol_type = other RNA
cgtgtctgagatagcctcgt

SEQ ID NO: 3076 - RNA, 20 nt, synthetic construct
  source 1..20: mol_type = other RNA
cgtgtgccacagcgtgtctg

SEQ ID NO: 3077 - RNA, 20 nt, synthetic construct
  source 1..20: mol_type = other RNA
cgtgtggtgggggtggcgaa

SEQ ID NO: 3078 - RNA, 20 nt, synthetic construct
  source 1..20: mol_type = other RNA
cgtgtgtgaaaacacaaatg

SEQ ID NO: 3079 - RNA, 20 nt, synthetic construct
  source 1..20: mol_type = other RNA
cgttctccacgcccaaggca

SEQ ID NO: 3080 - RNA, 20 nt, synthetic construct
  source 1..20: mol_type = other RNA
cgttctcgcggccttgtgac

SEQ ID NO: 3081 - RNA, 20 nt, synthetic construct
  source 1..20: mol_type = other RNA
cgttctctggctccccgtgg

SEQ ID NO: 3082 - RNA, 20 nt, synthetic construct
  source 1..20: mol_type = other RNA
cgttgaatgtgtagggttcg

SEQ ID NO: 3083 - RNA, 20 nt, synthetic construct
  source 1..20: mol_type = other RNA
cgttgcaacaccccattttc

SEQ ID NO: 3084 - RNA, 20 nt, synthetic construct
  source 1..20: mol_type = other RNA
cgttgccccctgggtggggc

SEQ ID NO: 3085 - RNA, 20 nt, synthetic construct
  source 1..20: mol_type = other RNA
cgttgcgcaggggcgcgggg

SEQ ID NO: 3086 - RNA, 20 nt, synthetic construct
  source 1..20: mol_type = other RNA
cgttgggagggaaaggggtg

SEQ ID NO: 3087 - RNA, 20 nt, synthetic construct
  source 1..20: mol_type = other RNA
cgttgggcctaactcgagtc

SEQ ID NO: 3088 - RNA, 20 nt, synthetic construct
  source 1..20: mol_type = other RNA
cgttgggggaggggaagcgt

SEQ ID NO: 3089 - RNA, 20 nt, synthetic construct
  source 1..20: mol_type = other RNA
cgttggtacggtcctccccg

SEQ ID NO: 3090 - RNA, 20 nt, synthetic construct
  source 1..20: mol_type = other RNA
cgtttacctttcccttgagg

SEQ ID NO: 3091 - RNA, 20 nt, synthetic construct
  source 1..20: mol_type = other RNA
cgtttccgctcgggcagcgg

SEQ ID NO: 3092 - RNA, 20 nt, synthetic construct
  source 1..20: mol_type = other RNA
cgtttcctggccgggaatgg

SEQ ID NO: 3093 - RNA, 20 nt, synthetic construct
  source 1..20: mol_type = other RNA
cgtttctcctcccgccgtgt

SEQ ID NO: 3094 - RNA, 20 nt, synthetic construct
  source 1..20: mol_type = other RNA
cgttttacttgccttgggcg

SEQ ID NO: 3095 - RNA, 20 nt, synthetic construct
  source 1..20: mol_type = other RNA
cgttttctggcttcccacct

SEQ ID NO: 3096 - RNA, 20 nt, synthetic construct
  source 1..20: mol_type = other RNA
ctaactcgagtcctgccgcc

SEQ ID NO: 3097 - RNA, 20 nt, synthetic construct
  source 1..20: mol_type = other RNA
ctaagagcttggggagggcc

SEQ ID NO: 3098 - RNA, 20 nt, synthetic construct
  source 1..20: mol_type = other RNA
ctaagcggctgcgtactccc

SEQ ID NO: 3099 - RNA, 20 nt, synthetic construct
  source 1..20: mol_type = other RNA
ctaatctaggcgacccaact

SEQ ID NO: 3100 - RNA, 20 nt, synthetic construct
  source 1..20: mol_type = other RNA
ctaattgattctatagagtc

SEQ ID NO: 3101 - RNA, 20 nt, synthetic construct
  source 1..20: mol_type = other RNA
ctacacattcaacgaggcta

SEQ ID NO: 3102 - RNA, 20 nt, synthetic construct
  source 1..20: mol_type = other RNA
ctacaccccacctacctacc

SEQ ID NO: 3103 - RNA, 20 nt, synthetic construct
  source 1..20: mol_type = other RNA
ctacactcctcttcacattc

SEQ ID NO: 3104 - RNA, 20 nt, synthetic construct
  source 1..20: mol_type = other RNA
ctacaggcactcgtgggggt

SEQ ID NO: 3105 - RNA, 20 nt, synthetic construct
  source 1..20: mol_type = other RNA
ctacccccgttctcgcggcc

SEQ ID NO: 3106 - RNA, 20 nt, synthetic construct
  source 1..20: mol_type = other RNA
ctacccgccccacccagggg

SEQ ID NO: 3107 - RNA, 20 nt, synthetic construct
  source 1..20: mol_type = other RNA
ctacctacccgccccaccca

SEQ ID NO: 3108 - RNA, 20 nt, synthetic construct
  source 1..20: mol_type = other RNA
ctacctagccgaggctctct

SEQ ID NO: 3109 - RNA, 20 nt, synthetic construct
  source 1..20: mol_type = other RNA
ctactccacgtttacctttc

SEQ ID NO: 3110 - RNA, 20 nt, synthetic construct
  source 1..20: mol_type = other RNA
ctactggctcgagtctcaca

SEQ ID NO: 3111 - RNA, 20 nt, synthetic construct
  source 1..20: mol_type = other RNA
ctactgtgttggcggactgg

SEQ ID NO: 3112 - RNA, 20 nt, synthetic construct
  source 1..20: mol_type = other RNA
ctacttgaaccagggctctt

SEQ ID NO: 3113 - RNA, 20 nt, synthetic construct
  source 1..20: mol_type = other RNA
ctagagaagaggctgtgctt

SEQ ID NO: 3114 - RNA, 20 nt, synthetic construct
  source 1..20: mol_type = other RNA
ctagattagagggggatctc

SEQ ID NO: 3115 - RNA, 20 nt, synthetic construct
  source 1..20: mol_type = other RNA
ctagccacccatccccccag

SEQ ID NO: 3116 - RNA, 20 nt, synthetic construct
  source 1..20: mol_type = other RNA
ctagccgaggctctctgagg

SEQ ID NO: 3117 - RNA, 20 nt, synthetic construct
  source 1..20: mol_type = other RNA
ctagccggaagcgctcctcc

SEQ ID NO: 3118 - RNA, 20 nt, synthetic construct
  source 1..20: mol_type = other RNA
ctagcctcttgtcgccgatt

SEQ ID NO: 3119 - RNA, 20 nt, synthetic construct
  source 1..20: mol_type = other RNA
ctaggcgacccaactccccc

SEQ ID NO: 3120 - RNA, 20 nt, synthetic construct
  source 1..20: mol_type = other RNA
ctaggcggccccggcggctt

SEQ ID NO: 3121 - RNA, 20 nt, synthetic construct
  source 1..20: mol_type = other RNA
ctaggggggccgtctggtgg

SEQ ID NO: 3122 - RNA, 20 nt, synthetic construct
  source 1..20: mol_type = other RNA
ctaggtaggggagcggaact

SEQ ID NO: 3123 - RNA, 20 nt, synthetic construct
  source 1..20: mol_type = other RNA
ctatagaatcaattagcata

SEQ ID NO: 3124 - RNA, 20 nt, synthetic construct
  source 1..20: mol_type = other RNA
ctatagagtccttgcttgtc

SEQ ID NO: 3125 - RNA, 20 nt, synthetic construct
  source 1..20: mol_type = other RNA
ctatctcagacacgctgtgg

SEQ ID NO: 3126 - RNA, 20 nt, synthetic construct
  source 1..20: mol_type = other RNA
ctatgctaattgattctata

SEQ ID NO: 3127 - RNA, 20 nt, synthetic construct
  source 1..20: mol_type = other RNA
ctcaactccaggctcgaacc

SEQ ID NO: 3128 - RNA, 20 nt, synthetic construct
  source 1..20: mol_type = other RNA
ctcaagggaaaggtaaacgt

SEQ ID NO: 3129 - RNA, 20 nt, synthetic construct
  source 1..20: mol_type = other RNA
ctcacaagatcgttctccac

SEQ ID NO: 3130 - RNA, 20 nt, synthetic construct
  source 1..20: mol_type = other RNA
ctcacatgagcgaaaccact

SEQ ID NO: 3131 - RNA, 20 nt, synthetic construct
  source 1..20: mol_type = other RNA
ctcacccccctcgccgcctt

SEQ ID NO: 3132 - RNA, 20 nt, synthetic construct
  source 1..20: mol_type = other RNA
ctcacgatcgggccccaggg

SEQ ID NO: 3133 - RNA, 20 nt, synthetic construct
  source 1..20: mol_type = other RNA
ctcacgcagccccagtcccg

SEQ ID NO: 3134 - RNA, 20 nt, synthetic construct
  source 1..20: mol_type = other RNA
ctcacgggtacgggccattc

SEQ ID NO: 3135 - RNA, 20 nt, synthetic construct
  source 1..20: mol_type = other RNA
ctcactcagcccgctgcccg

SEQ ID NO: 3136 - RNA, 20 nt, synthetic construct
  source 1..20: mol_type = other RNA
ctcacttcttgggcgtcagt

SEQ ID NO: 3137 - RNA, 20 nt, synthetic construct
  source 1..20: mol_type = other RNA
ctcagacacgctgtggcaca

SEQ ID NO: 3138 - RNA, 20 nt, synthetic construct
  source 1..20: mol_type = other RNA
ctcagagactcacgcagccc

SEQ ID NO: 3139 - RNA, 20 nt, synthetic construct
  source 1..20: mol_type = other RNA
ctcagagagcctcggctagg

SEQ ID NO: 3140 - RNA, 20 nt, synthetic construct
  source 1..20: mol_type = other RNA
ctcagatggctgcttcccaa

SEQ ID NO: 3141 - RNA, 20 nt, synthetic construct
  source 1..20: mol_type = other RNA
ctcagcccgctgcccgagcg

SEQ ID NO: 3142 - RNA, 20 nt, synthetic construct
  source 1..20: mol_type = other RNA
ctcatgcgatttacctactt

SEQ ID NO: 3143 - RNA, 20 nt, synthetic construct
  source 1..20: mol_type = other RNA
ctcatgtgagactcgagcca

SEQ ID NO: 3144 - RNA, 20 nt, synthetic construct
  source 1..20: mol_type = other RNA
ctccaaccagaatacgccat

SEQ ID NO: 3145 - RNA, 20 nt, synthetic construct
  source 1..20: mol_type = other RNA
ctccacgcccaaggcaagta

SEQ ID NO: 3146 - RNA, 20 nt, synthetic construct
  source 1..20: mol_type = other RNA
ctccacgtttacctttccct

SEQ ID NO: 3147 - RNA, 20 nt, synthetic construct
  source 1..20: mol_type = other RNA
ctccagcgcgcgcttcctgc

SEQ ID NO: 3148 - RNA, 20 nt, synthetic construct
  source 1..20: mol_type = other RNA
ctccaggctcgaaccctaca

SEQ ID NO: 3149 - RNA, 20 nt, synthetic construct
  source 1..20: mol_type = other RNA
ctcccaacgtaacaaacatt

SEQ ID NO: 3150 - RNA, 20 nt, synthetic construct
  source 1..20: mol_type = other RNA
ctcccaccagagttccgctc

SEQ ID NO: 3151 - RNA, 20 nt, synthetic construct
  source 1..20: mol_type = other RNA
ctcccaccctccccttcctt

SEQ ID NO: 3152 - RNA, 20 nt, synthetic construct
  source 1..20: mol_type = other RNA
ctccccaagctcttaggagg

SEQ ID NO: 3153 - RNA, 20 nt, synthetic construct
  source 1..20: mol_type = other RNA
ctcccccaacgcctcttcac

SEQ ID NO: 3154 - RNA, 20 nt, synthetic construct
  source 1..20: mol_type = other RNA
ctcccccacccccacgagtg

SEQ ID NO: 3155 - RNA, 20 nt, synthetic construct
  source 1..20: mol_type = other RNA
ctcccccgaaggaaggggag

SEQ ID NO: 3156 - RNA, 20 nt, synthetic construct
  source 1..20: mol_type = other RNA
ctccccctttcatgtttttc

SEQ ID NO: 3157 - RNA, 20 nt, synthetic construct
  source 1..20: mol_type = other RNA
ctccccgaggccgagcgccg

SEQ ID NO: 3158 - RNA, 20 nt, synthetic construct
  source 1..20: mol_type = other RNA
ctccccgatcccccactccc

SEQ ID NO: 3159 - RNA, 20 nt, synthetic construct
  source 1..20: mol_type = other RNA
ctccccgcctttggctcgct

SEQ ID NO: 3160 - RNA, 20 nt, synthetic construct
  source 1..20: mol_type = other RNA
ctccccgcgctcgctctcct

SEQ ID NO: 3161 - RNA, 20 nt, synthetic construct
  source 1..20: mol_type = other RNA
ctccccgtggcgtgtgccac

SEQ ID NO: 3162 - RNA, 20 nt, synthetic construct
  source 1..20: mol_type = other RNA
ctcccctacctagccgaggc

SEQ ID NO: 3163 - RNA, 20 nt, synthetic construct
  source 1..20: mol_type = other RNA
ctcccctcccaccagagttc

SEQ ID NO: 3164 - RNA, 20 nt, synthetic construct
  source 1..20: mol_type = other RNA
ctcccctccgtaatcttcct

SEQ ID NO: 3165 - RNA, 20 nt, synthetic construct
  source 1..20: mol_type = other RNA
ctcccctggggcccgatcgt

SEQ ID NO: 3166 - RNA, 20 nt, synthetic construct
  source 1..20: mol_type = other RNA
ctccccttccttcgggggag

SEQ ID NO: 3167 - RNA, 20 nt, synthetic construct
  source 1..20: mol_type = other RNA
ctcccgacggcgtaactgac

SEQ ID NO: 3168 - RNA, 20 nt, synthetic construct
  source 1..20: mol_type = other RNA
ctcccgccgcgccattggcc

SEQ ID NO: 3169 - RNA, 20 nt, synthetic construct
  source 1..20: mol_type = other RNA
ctcccgccgtgtgtgaaaac

SEQ ID NO: 3170 - RNA, 20 nt, synthetic construct
  source 1..20: mol_type = other RNA
ctcccgcctgcatccagcca

SEQ ID NO: 3171 - RNA, 20 nt, synthetic construct
  source 1..20: mol_type = other RNA
ctcccgggaggcggcaggac

SEQ ID NO: 3172 - RNA, 20 nt, synthetic construct
  source 1..20: mol_type = other RNA
ctccctacccccgttctcgc

SEQ ID NO: 3173 - RNA, 20 nt, synthetic construct
  source 1..20: mol_type = other RNA
ctccctccccctccggttgc

SEQ ID NO: 3174 - RNA, 20 nt, synthetic construct
  source 1..20: mol_type = other RNA
ctccctcccgcctgcatcca

SEQ ID NO: 3175 - RNA, 20 nt, synthetic construct
  source 1..20: mol_type = other RNA
ctccctctgcgagagcaatg

SEQ ID NO: 3176 - RNA, 20 nt, synthetic construct
  source 1..20: mol_type = other RNA
ctccctgggaaaatggggtg

SEQ ID NO: 3177 - RNA, 20 nt, synthetic construct
  source 1..20: mol_type = other RNA
ctcccttctccctccccctc

SEQ ID NO: 3178 - RNA, 20 nt, synthetic construct
  source 1..20: mol_type = other RNA
ctccgcccaccgccccgcac

SEQ ID NO: 3179 - RNA, 20 nt, synthetic construct
  source 1..20: mol_type = other RNA
ctccgccccgggttcccacc

SEQ ID NO: 3180 - RNA, 20 nt, synthetic construct
  source 1..20: mol_type = other RNA
ctccgcctttctgcccccca

SEQ ID NO: 3181 - RNA, 20 nt, synthetic construct
  source 1..20: mol_type = other RNA
ctccgctcgaaatacacagg

SEQ ID NO: 3182 - RNA, 20 nt, synthetic construct
  source 1..20: mol_type = other RNA
ctccggctcctcagagagcc

SEQ ID NO: 3183 - RNA, 20 nt, synthetic construct
  source 1..20: mol_type = other RNA
ctccggttgccgcagggcgg

SEQ ID NO: 3184 - RNA, 20 nt, synthetic construct
  source 1..20: mol_type = other RNA
ctccgtaatcttcctggacg

SEQ ID NO: 3185 - RNA, 20 nt, synthetic construct
  source 1..20: mol_type = other RNA
ctccgtccggtttcgagcat

SEQ ID NO: 3186 - RNA, 20 nt, synthetic construct
  source 1..20: mol_type = other RNA
ctccgtctccccgcgctcgc

SEQ ID NO: 3187 - RNA, 20 nt, synthetic construct
  source 1..20: mol_type = other RNA
ctcctaagagcttggggagg

SEQ ID NO: 3188 - RNA, 20 nt, synthetic construct
  source 1..20: mol_type = other RNA
ctcctcaagggaaaggtaaa

SEQ ID NO: 3189 - RNA, 20 nt, synthetic construct
  source 1..20: mol_type = other RNA
ctcctcagagagcctcggct

SEQ ID NO: 3190 - RNA, 20 nt, synthetic construct
  source 1..20: mol_type = other RNA
ctcctcccccacccccacga

SEQ ID NO: 3191 - RNA, 20 nt, synthetic construct
  source 1..20: mol_type = other RNA
ctcctcccgccgtgtgtgaa

SEQ ID NO: 3192 - RNA, 20 nt, synthetic construct
  source 1..20: mol_type = other RNA
ctcctccctctgcgagagca

SEQ ID NO: 3193 - RNA, 20 nt, synthetic construct
  source 1..20: mol_type = other RNA
ctcctccgtctccccgcgct

SEQ ID NO: 3194 - RNA, 20 nt, synthetic construct
  source 1..20: mol_type = other RNA
ctcctcttcacattcccgac

SEQ ID NO: 3195 - RNA, 20 nt, synthetic construct
  source 1..20: mol_type = other RNA
ctcctgcggcgggaggggag

SEQ ID NO: 3196 - RNA, 20 nt, synthetic construct
  source 1..20: mol_type = other RNA
ctcctgtcagttacgccgtc

SEQ ID NO: 3197 - RNA, 20 nt, synthetic construct
  source 1..20: mol_type = other RNA
ctccttgggtcgtgggcctg

SEQ ID NO: 3198 - RNA, 20 nt, synthetic construct
  source 1..20: mol_type = other RNA
ctcgaaaccggacggagcca

SEQ ID NO: 3199 - RNA, 20 nt, synthetic construct
  source 1..20: mol_type = other RNA
ctcgaaccctacacattcaa

SEQ ID NO: 3200 - RNA, 20 nt, synthetic construct
  source 1..20: mol_type = other RNA
ctcgagccagtagcaagggc

SEQ ID NO: 3201 - RNA, 20 nt, synthetic construct
  source 1..20: mol_type = other RNA
ctcgagtcctgccgcctccc

SEQ ID NO: 3202 - RNA, 20 nt, synthetic construct
  source 1..20: mol_type = other RNA
ctcgagtctcacatgagcga

SEQ ID NO: 3203 - RNA, 20 nt, synthetic construct
  source 1..20: mol_type = other RNA
ctcgagttaggcccaacgcg

SEQ ID NO: 3204 - RNA, 20 nt, synthetic construct
  source 1..20: mol_type = other RNA
ctcgcagagggaggagcgct

SEQ ID NO: 3205 - RNA, 20 nt, synthetic construct
  source 1..20: mol_type = other RNA
ctcgcccttcaggcggtggg

SEQ ID NO: 3206 - RNA, 20 nt, synthetic construct
  source 1..20: mol_type = other RNA
ctcgccgccaatcagcggaa

SEQ ID NO: 3207 - RNA, 20 nt, synthetic construct
  source 1..20: mol_type = other RNA
ctcgccgccttgcacacacc

SEQ ID NO: 3208 - RNA, 20 nt, synthetic construct
  source 1..20: mol_type = other RNA
ctcgcggccttgtgacagac

SEQ ID NO: 3209 - RNA, 20 nt, synthetic construct
  source 1..20: mol_type = other RNA
ctcgcgttgccccctgggtg

SEQ ID NO: 3210 - RNA, 20 nt, synthetic construct
  source 1..20: mol_type = other RNA
ctcgctccgcctttctgccc

SEQ ID NO: 3211 - RNA, 20 nt, synthetic construct
  source 1..20: mol_type = other RNA
ctcgctctccttgggtcgtg

SEQ ID NO: 3212 - RNA, 20 nt, synthetic construct
  source 1..20: mol_type = other RNA
ctcggcctcggggaggaccg

SEQ ID NO: 3213 - RNA, 20 nt, synthetic construct
  source 1..20: mol_type = other RNA
ctcggctaggtaggggagcg

SEQ ID NO: 3214 - RNA, 20 nt, synthetic construct
  source 1..20: mol_type = other RNA
ctcgggcagcgggctgagtg

SEQ ID NO: 3215 - RNA, 20 nt, synthetic construct
  source 1..20: mol_type = other RNA
ctcggggaggaccgtaccaa

SEQ ID NO: 3216 - RNA, 20 nt, synthetic construct
  source 1..20: mol_type = other RNA
ctcgtgggggtgggggagga

SEQ ID NO: 3217 - RNA, 20 nt, synthetic construct
  source 1..20: mol_type = other RNA
ctcgttgaatgtgtagggtt

SEQ ID NO: 3218 - RNA, 20 nt, synthetic construct
  source 1..20: mol_type = other RNA
ctcgttttctggcttcccac

SEQ ID NO: 3219 - RNA, 20 nt, synthetic construct
  source 1..20: mol_type = other RNA
ctctaatctaggcgacccaa

SEQ ID NO: 3220 - RNA, 20 nt, synthetic construct
  source 1..20: mol_type = other RNA
ctctacaccccacctaccta

SEQ ID NO: 3221 - RNA, 20 nt, synthetic construct
  source 1..20: mol_type = other RNA
ctctaggcggccccggcggc

SEQ ID NO: 3222 - RNA, 20 nt, synthetic construct
  source 1..20: mol_type = other RNA
ctctatagaatcaattagca

SEQ ID NO: 3223 - RNA, 20 nt, synthetic construct
  source 1..20: mol_type = other RNA
ctctcatgcgatttacctac

SEQ ID NO: 3224 - RNA, 20 nt, synthetic construct
  source 1..20: mol_type = other RNA
ctctccccgatcccccactc

SEQ ID NO: 3225 - RNA, 20 nt, synthetic construct
  source 1..20: mol_type = other RNA
ctctccctgggaaaatgggg

SEQ ID NO: 3226 - RNA, 20 nt, synthetic construct
  source 1..20: mol_type = other RNA
ctctccgcccaccgccccgc

SEQ ID NO: 3227 - RNA, 20 nt, synthetic construct
  source 1..20: mol_type = other RNA
ctctcctcaagggaaaggta

SEQ ID NO: 3228 - RNA, 20 nt, synthetic construct
  source 1..20: mol_type = other RNA
ctctccttgggtcgtgggcc

SEQ ID NO: 3229 - RNA, 20 nt, synthetic construct
  source 1..20: mol_type = other RNA
ctctcgcagagggaggagcg

SEQ ID NO: 3230 - RNA, 20 nt, synthetic construct
  source 1..20: mol_type = other RNA
ctctcgcgttgccccctggg

SEQ ID NO: 3231 - RNA, 20 nt, synthetic construct
  source 1..20: mol_type = other RNA
ctctcgttttctggcttccc

SEQ ID NO: 3232 - RNA, 20 nt, synthetic construct
  source 1..20: mol_type = other RNA
ctctctccctgggaaaatgg

SEQ ID NO: 3233 - RNA, 20 nt, synthetic construct
  source 1..20: mol_type = other RNA
ctctctgaggagccggagcg

SEQ ID NO: 3234 - RNA, 20 nt, synthetic construct
  source 1..20: mol_type = other RNA
ctctgaggagccggagcgcc

SEQ ID NO: 3235 - RNA, 20 nt, synthetic construct
  source 1..20: mol_type = other RNA
ctctgatcgctctgggggcc

SEQ ID NO: 3236 - RNA, 20 nt, synthetic construct
  source 1..20: mol_type = other RNA
ctctgcgagagcaatggctc

SEQ ID NO: 3237 - RNA, 20 nt, synthetic construct
  source 1..20: mol_type = other RNA
ctctgcgtgtaagtcgggaa

SEQ ID NO: 3238 - RNA, 20 nt, synthetic construct
  source 1..20: mol_type = other RNA
ctctggcgcgggcgtcctcc

SEQ ID NO: 3239 - RNA, 20 nt, synthetic construct
  source 1..20: mol_type = other RNA
ctctggctccccgtggcgtg

SEQ ID NO: 3240 - RNA, 20 nt, synthetic construct
  source 1..20: mol_type = other RNA
ctctgggggccgcgatctcc

SEQ ID NO: 3241 - RNA, 20 nt, synthetic construct
  source 1..20: mol_type = other RNA
ctctggtgggaggggaggtg

SEQ ID NO: 3242 - RNA, 20 nt, synthetic construct
  source 1..20: mol_type = other RNA
ctcttaggaggatgctgcca

SEQ ID NO: 3243 - RNA, 20 nt, synthetic construct
  source 1..20: mol_type = other RNA
ctcttcacattcccgactta

SEQ ID NO: 3244 - RNA, 20 nt, synthetic construct
  source 1..20: mol_type = other RNA
ctcttcaccccctttcctgg

SEQ ID NO: 3245 - RNA, 20 nt, synthetic construct
  source 1..20: mol_type = other RNA
ctcttctctaggcggccccg

SEQ ID NO: 3246 - RNA, 20 nt, synthetic construct
  source 1..20: mol_type = other RNA
ctcttgctgccctccgctcg

SEQ ID NO: 3247 - RNA, 20 nt, synthetic construct
  source 1..20: mol_type = other RNA
ctcttgtcgccgattggccg

SEQ ID NO: 3248 - RNA, 20 nt, synthetic construct
  source 1..20: mol_type = other RNA
ctctttccctctgcgtgtaa

SEQ ID NO: 3249 - RNA, 20 nt, synthetic construct
  source 1..20: mol_type = other RNA
ctctttcctacactcctctt

SEQ ID NO: 3250 - RNA, 20 nt, synthetic construct
  source 1..20: mol_type = other RNA
ctcttttctgtcggaccctt

SEQ ID NO: 3251 - RNA, 20 nt, synthetic construct
  source 1..20: mol_type = other RNA
ctgaagggcgagacaagccc

SEQ ID NO: 3252 - RNA, 20 nt, synthetic construct
  source 1..20: mol_type = other RNA
ctgacaggagctttactcca

SEQ ID NO: 3253 - RNA, 20 nt, synthetic construct
  source 1..20: mol_type = other RNA
ctgacccaggaaaaacatga

SEQ ID NO: 3254 - RNA, 20 nt, synthetic construct
  source 1..20: mol_type = other RNA
ctgaccctcccctcccgccg

SEQ ID NO: 3255 - RNA, 20 nt, synthetic construct
  source 1..20: mol_type = other RNA
ctgaccgcacggggattccc

SEQ ID NO: 3256 - RNA, 20 nt, synthetic construct
  source 1..20: mol_type = other RNA
ctgacgcccaagaagtgaga

SEQ ID NO: 3257 - RNA, 20 nt, synthetic construct
  source 1..20: mol_type = other RNA
ctgagatagcctcgttgaat

SEQ ID NO: 3258 - RNA, 20 nt, synthetic construct
  source 1..20: mol_type = other RNA
ctgaggagccggagcgccga

SEQ ID NO: 3259 - RNA, 20 nt, synthetic construct
  source 1..20: mol_type = other RNA
ctgaggtgggaagccagaaa

SEQ ID NO: 3260 - RNA, 20 nt, synthetic construct
  source 1..20: mol_type = other RNA
ctgatcgctctgggggccgc

SEQ ID NO: 3261 - RNA, 20 nt, synthetic construct
  source 1..20: mol_type = other RNA
ctgattggcggcgagtgggc

SEQ ID NO: 3262 - RNA, 20 nt, synthetic construct
  source 1..20: mol_type = other RNA
ctgattggctgtcgaagctg

SEQ ID NO: 3263 - RNA, 20 nt, synthetic construct
  source 1..20: mol_type = other RNA
ctgcagcatccatatccaag

SEQ ID NO: 3264 - RNA, 20 nt, synthetic construct
  source 1..20: mol_type = other RNA
ctgcatccagccaccccttt

SEQ ID NO: 3265 - RNA, 20 nt, synthetic construct
  source 1..20: mol_type = other RNA
ctgccacttctcacccccct

SEQ ID NO: 3266 - RNA, 20 nt, synthetic construct
  source 1..20: mol_type = other RNA
ctgccccccacccccacctc

SEQ ID NO: 3267 - RNA, 20 nt, synthetic construct
  source 1..20: mol_type = other RNA
ctgcccgagcggaaacgcca

SEQ ID NO: 3268 - RNA, 20 nt, synthetic construct
  source 1..20: mol_type = other RNA
ctgccctccgctcgaaatac

SEQ ID NO: 3269 - RNA, 20 nt, synthetic construct
  source 1..20: mol_type = other RNA
ctgccggccgagacttctgg

SEQ ID NO: 3270 - RNA, 20 nt, synthetic construct
  source 1..20: mol_type = other RNA
ctgcctactccacgtttacc

SEQ ID NO: 3271 - RNA, 20 nt, synthetic construct
  source 1..20: mol_type = other RNA
ctgcctttgaagatattctc

SEQ ID NO: 3272 - RNA, 20 nt, synthetic construct
  source 1..20: mol_type = other RNA
ctgcgagagcaatggctccg

SEQ ID NO: 3273 - RNA, 20 nt, synthetic construct
  source 1..20: mol_type = other RNA
ctgcgcaacgtggcaggaag

SEQ ID NO: 3274 - RNA, 20 nt, synthetic construct
  source 1..20: mol_type = other RNA
ctgcgctcagagactcacgc

SEQ ID NO: 3275 - RNA, 20 nt, synthetic construct
  source 1..20: mol_type = other RNA
ctgcggcaaccggaggggga

SEQ ID NO: 3276 - RNA, 20 nt, synthetic construct
  source 1..20: mol_type = other RNA
ctgcggcgggaggggagggt

SEQ ID NO: 3277 - RNA, 20 nt, synthetic construct
  source 1..20: mol_type = other RNA
ctgcgtactcccgacggcgt

SEQ ID NO: 3278 - RNA, 20 nt, synthetic construct
  source 1..20: mol_type = other RNA
ctgcgtgagtctctgagcgc

SEQ ID NO: 3279 - RNA, 20 nt, synthetic construct
  source 1..20: mol_type = other RNA
ctgcgtgtaagtcgggaatg

SEQ ID NO: 3280 - RNA, 20 nt, synthetic construct
  source 1..20: mol_type = other RNA
ctgctacaggcactcgtggg

SEQ ID NO: 3281 - RNA, 20 nt, synthetic construct
  source 1..20: mol_type = other RNA
ctgcttcccaaaggcattac

SEQ ID NO: 3282 - RNA, 20 nt, synthetic construct
  source 1..20: mol_type = other RNA
ctgcttgtcttcgacacctg

SEQ ID NO: 3283 - RNA, 20 nt, synthetic construct
  source 1..20: mol_type = other RNA
ctggacgccttccctctcgt

SEQ ID NO: 3284 - RNA, 20 nt, synthetic construct
  source 1..20: mol_type = other RNA
ctggagttgagccagattgt

SEQ ID NO: 3285 - RNA, 20 nt, synthetic construct
  source 1..20: mol_type = other RNA
ctggatgcaggcgggaggga

SEQ ID NO: 3286 - RNA, 20 nt, synthetic construct
  source 1..20: mol_type = other RNA
ctggccctccccaagctctt

SEQ ID NO: 3287 - RNA, 20 nt, synthetic construct
  source 1..20: mol_type = other RNA
ctggccgggaatggcccgta

SEQ ID NO: 3288 - RNA, 20 nt, synthetic construct
  source 1..20: mol_type = other RNA
ctggcgccggcgctgggaat

SEQ ID NO: 3289 - RNA, 20 nt, synthetic construct
  source 1..20: mol_type = other RNA
ctggcgggactggggctgcg

SEQ ID NO: 3290 - RNA, 20 nt, synthetic construct
  source 1..20: mol_type = other RNA
ctggctcaactccaggctcg

SEQ ID NO: 3291 - RNA, 20 nt, synthetic construct
  source 1..20: mol_type = other RNA
ctggctccccgtggcgtgtg

SEQ ID NO: 3292 - RNA, 20 nt, synthetic construct
  source 1..20: mol_type = other RNA
ctggctcgagtctcacatga

SEQ ID NO: 3293 - RNA, 20 nt, synthetic construct
  source 1..20: mol_type = other RNA
ctggcttcccacctcagatg

SEQ ID NO: 3294 - RNA, 20 nt, synthetic construct
  source 1..20: mol_type = other RNA
ctgggaaaatggggtgttgc

SEQ ID NO: 3295 - RNA, 20 nt, synthetic construct
  source 1..20: mol_type = other RNA
ctgggaactgcctactccac

SEQ ID NO: 3296 - RNA, 20 nt, synthetic construct
  source 1..20: mol_type = other RNA
ctgggaatccccgtgcggtc

SEQ ID NO: 3297 - RNA, 20 nt, synthetic construct
  source 1..20: mol_type = other RNA
ctgggacaaggtaagggtcc

SEQ ID NO: 3298 - RNA, 20 nt, synthetic construct
  source 1..20: mol_type = other RNA
ctggggcccgatcgtgaggt

SEQ ID NO: 3299 - RNA, 20 nt, synthetic construct
  source 1..20: mol_type = other RNA
ctggggctgcgtgagtctct

SEQ ID NO: 3300 - RNA, 20 nt, synthetic construct
  source 1..20: mol_type = other RNA
ctgggggccgcgatctcccc

SEQ ID NO: 3301 - RNA, 20 nt, synthetic construct
  source 1..20: mol_type = other RNA
ctggggggatgggtggctag

SEQ ID NO: 3302 - RNA, 20 nt, synthetic construct
  source 1..20: mol_type = other RNA
ctgggtcaggacgcttcccc

SEQ ID NO: 3303 - RNA, 20 nt, synthetic construct
  source 1..20: mol_type = other RNA
ctgggtggggcgggtaggta

SEQ ID NO: 3304 - RNA, 20 nt, synthetic construct
  source 1..20: mol_type = other RNA
ctggtggcttgcgggggttg

SEQ ID NO: 3305 - RNA, 20 nt, synthetic construct
  source 1..20: mol_type = other RNA
ctggtgggaggggaggtgcg

SEQ ID NO: 3306 - RNA, 20 nt, synthetic construct
  source 1..20: mol_type = other RNA
ctggttcaagtaggtaaatc

SEQ ID NO: 3307 - RNA, 20 nt, synthetic construct
  source 1..20: mol_type = other RNA
ctggttggagtaaagctcct

SEQ ID NO: 3308 - RNA, 20 nt, synthetic construct
  source 1..20: mol_type = other RNA
ctgtagcaggtcgggcttgt

SEQ ID NO: 3309 - RNA, 20 nt, synthetic construct
  source 1..20: mol_type = other RNA
ctgtcacaaggccgcgagaa

SEQ ID NO: 3310 - RNA, 20 nt, synthetic construct
  source 1..20: mol_type = other RNA
ctgtcagttacgccgtcggg

SEQ ID NO: 3311 - RNA, 20 nt, synthetic construct
  source 1..20: mol_type = other RNA
ctgtcgaagctgtgggaccg

SEQ ID NO: 3312 - RNA, 20 nt, synthetic construct
  source 1..20: mol_type = other RNA
ctgtcggacccttaccttgt

SEQ ID NO: 3313 - RNA, 20 nt, synthetic construct
  source 1..20: mol_type = other RNA
ctgtgcttcggcgctccggc

SEQ ID NO: 3314 - RNA, 20 nt, synthetic construct
  source 1..20: mol_type = other RNA
ctgtggcacacgccacgggg

SEQ ID NO: 3315 - RNA, 20 nt, synthetic construct
  source 1..20: mol_type = other RNA
ctgtgggaccgggcccttgc

SEQ ID NO: 3316 - RNA, 20 nt, synthetic construct
  source 1..20: mol_type = other RNA
ctgtgtatttcgagcggagg

SEQ ID NO: 3317 - RNA, 20 nt, synthetic construct
  source 1..20: mol_type = other RNA
ctgtgttggcggactggcgg

SEQ ID NO: 3318 - RNA, 20 nt, synthetic construct
  source 1..20: mol_type = other RNA
ctgttgggaaagccccttct

SEQ ID NO: 3319 - RNA, 20 nt, synthetic construct
  source 1..20: mol_type = other RNA
cttacacgcagagggaaaga

SEQ ID NO: 3320 - RNA, 20 nt, synthetic construct
  source 1..20: mol_type = other RNA
cttaccttgtcccaggcgct

SEQ ID NO: 3321 - RNA, 20 nt, synthetic construct
  source 1..20: mol_type = other RNA
cttagcgactctcgcgttgc

SEQ ID NO: 3322 - RNA, 20 nt, synthetic construct
  source 1..20: mol_type = other RNA
cttaggaggatgctgccact

SEQ ID NO: 3323 - RNA, 20 nt, synthetic construct
  source 1..20: mol_type = other RNA
cttcaaaggcagaaaaatat

SEQ ID NO: 3324 - RNA, 20 nt, synthetic construct
  source 1..20: mol_type = other RNA
cttcacattcccgacttaca

SEQ ID NO: 3325 - RNA, 20 nt, synthetic construct
  source 1..20: mol_type = other RNA
cttcaccccctttcctggga

SEQ ID NO: 3326 - RNA, 20 nt, synthetic construct
  source 1..20: mol_type = other RNA
cttcaggcggtgggaacccg

SEQ ID NO: 3327 - RNA, 20 nt, synthetic construct
  source 1..20: mol_type = other RNA
cttcccaaaggcattacctt

SEQ ID NO: 3328 - RNA, 20 nt, synthetic construct
  source 1..20: mol_type = other RNA
cttcccacctcagatggctg

SEQ ID NO: 3329 - RNA, 20 nt, synthetic construct
  source 1..20: mol_type = other RNA
cttcccacgggaaaggcaac

SEQ ID NO: 3330 - RNA, 20 nt, synthetic construct
  source 1..20: mol_type = other RNA
cttcccctcccccaacgcct

SEQ ID NO: 3331 - RNA, 20 nt, synthetic construct
  source 1..20: mol_type = other RNA
cttccctcccctggggcccg

SEQ ID NO: 3332 - RNA, 20 nt, synthetic construct
  source 1..20: mol_type = other RNA
cttccctctcgttttctggc

SEQ ID NO: 3333 - RNA, 20 nt, synthetic construct
  source 1..20: mol_type = other RNA
cttccgctgattggcggcga

SEQ ID NO: 3334 - RNA, 20 nt, synthetic construct
  source 1..20: mol_type = other RNA
cttccggctagcctcttgtc

SEQ ID NO: 3335 - RNA, 20 nt, synthetic construct
  source 1..20: mol_type = other RNA
cttcctgccacgttgcgcag

SEQ ID NO: 3336 - RNA, 20 nt, synthetic construct
  source 1..20: mol_type = other RNA
cttcctggacgccttccctc

SEQ ID NO: 3337 - RNA, 20 nt, synthetic construct
  source 1..20: mol_type = other RNA
cttccttcgggggagtcggt

SEQ ID NO: 3338 - RNA, 20 nt, synthetic construct
  source 1..20: mol_type = other RNA
cttcgacacctgattggctg

SEQ ID NO: 3339 - RNA, 20 nt, synthetic construct
  source 1..20: mol_type = other RNA
cttcgacagccaatcaggtg

SEQ ID NO: 3340 - RNA, 20 nt, synthetic construct
  source 1..20: mol_type = other RNA
cttcgccacccccaccacac

SEQ ID NO: 3341 - RNA, 20 nt, synthetic construct
  source 1..20: mol_type = other RNA
cttcggcgctccggctcctc

SEQ ID NO: 3342 - RNA, 20 nt, synthetic construct
  source 1..20: mol_type = other RNA
cttcgggggagtcggtttac

SEQ ID NO: 3343 - RNA, 20 nt, synthetic construct
  source 1..20: mol_type = other RNA
cttctatgctaattgattct

SEQ ID NO: 3344 - RNA, 20 nt, synthetic construct
  source 1..20: mol_type = other RNA
cttctcacccccctcgccgc

SEQ ID NO: 3345 - RNA, 20 nt, synthetic construct
  source 1..20: mol_type = other RNA
cttctccctccccctccggt

SEQ ID NO: 3346 - RNA, 20 nt, synthetic construct
  source 1..20: mol_type = other RNA
cttctctaggcggccccggc

SEQ ID NO: 3347 - RNA, 20 nt, synthetic construct
  source 1..20: mol_type = other RNA
cttctggatggcggcggccg

SEQ ID NO: 3348 - RNA, 20 nt, synthetic construct
  source 1..20: mol_type = other RNA
cttcttgggcgtcagtggtc

SEQ ID NO: 3349 - RNA, 20 nt, synthetic construct
  source 1..20: mol_type = other RNA
cttgaaccagggctctttcc

SEQ ID NO: 3350 - RNA, 20 nt, synthetic construct
  source 1..20: mol_type = other RNA
cttgaggagaggcctcttgc

SEQ ID NO: 3351 - RNA, 20 nt, synthetic construct
  source 1..20: mol_type = other RNA
cttgcacacaccgttgcaac

SEQ ID NO: 3352 - RNA, 20 nt, synthetic construct
  source 1..20: mol_type = other RNA
cttgccttgggcgtggagaa

SEQ ID NO: 3353 - RNA, 20 nt, synthetic construct
  source 1..20: mol_type = other RNA
cttgcgggggttgcctttcc

SEQ ID NO: 3354 - RNA, 20 nt, synthetic construct
  source 1..20: mol_type = other RNA
cttgctactggctcgagtct

SEQ ID NO: 3355 - RNA, 20 nt, synthetic construct
  source 1..20: mol_type = other RNA
cttgctgccctccgctcgaa

SEQ ID NO: 3356 - RNA, 20 nt, synthetic construct
  source 1..20: mol_type = other RNA
cttgcttgtctcacttcttg

SEQ ID NO: 3357 - RNA, 20 nt, synthetic construct
  source 1..20: mol_type = other RNA
cttgggcgtcagtggtcttt

SEQ ID NO: 3358 - RNA, 20 nt, synthetic construct
  source 1..20: mol_type = other RNA
cttgggcgtggagaacgatc

SEQ ID NO: 3359 - RNA, 20 nt, synthetic construct
  source 1..20: mol_type = other RNA
cttggggagggccaggccca

SEQ ID NO: 3360 - RNA, 20 nt, synthetic construct
  source 1..20: mol_type = other RNA
cttgggtcgtgggcctggcc

SEQ ID NO: 3361 - RNA, 20 nt, synthetic construct
  source 1..20: mol_type = other RNA
cttgtcccaggcgctgccgg

SEQ ID NO: 3362 - RNA, 20 nt, synthetic construct
  source 1..20: mol_type = other RNA
cttgtcgccgattggccgtt

SEQ ID NO: 3363 - RNA, 20 nt, synthetic construct
  source 1..20: mol_type = other RNA
cttgtctcacttcttgggcg

SEQ ID NO: 3364 - RNA, 20 nt, synthetic construct
  source 1..20: mol_type = other RNA
cttgtctcgcccttcaggcg

SEQ ID NO: 3365 - RNA, 20 nt, synthetic construct
  source 1..20: mol_type = other RNA
cttgtcttcgacacctgatt

SEQ ID NO: 3366 - RNA, 20 nt, synthetic construct
  source 1..20: mol_type = other RNA
cttgtgacagacaactctga

SEQ ID NO: 3367 - RNA, 20 nt, synthetic construct
  source 1..20: mol_type = other RNA
cttgtgagaatatcttcaaa

SEQ ID NO: 3368 - RNA, 20 nt, synthetic construct
  source 1..20: mol_type = other RNA
ctttactccaaccagaatac

SEQ ID NO: 3369 - RNA, 20 nt, synthetic construct
  source 1..20: mol_type = other RNA
ctttatgaattctctttccc

SEQ ID NO: 3370 - RNA, 20 nt, synthetic construct
  source 1..20: mol_type = other RNA
ctttcatgtttttcctgggt

SEQ ID NO: 3371 - RNA, 20 nt, synthetic construct
  source 1..20: mol_type = other RNA
ctttcccaacagtttaactt

SEQ ID NO: 3372 - RNA, 20 nt, synthetic construct
  source 1..20: mol_type = other RNA
ctttcccgtgggaagtcggg

SEQ ID NO: 3373 - RNA, 20 nt, synthetic construct
  source 1..20: mol_type = other RNA
ctttccctcccaacgtaaca

SEQ ID NO: 3374 - RNA, 20 nt, synthetic construct
  source 1..20: mol_type = other RNA
ctttccctctcatgcgattt

SEQ ID NO: 3375 - RNA, 20 nt, synthetic construct
  source 1..20: mol_type = other RNA
ctttccctctgcgtgtaagt

SEQ ID NO: 3376 - RNA, 20 nt, synthetic construct
  source 1..20: mol_type = other RNA
ctttcccttgaggagaggcc

SEQ ID NO: 3377 - RNA, 20 nt, synthetic construct
  source 1..20: mol_type = other RNA
ctttcctacactcctcttca

SEQ ID NO: 3378 - RNA, 20 nt, synthetic construct
  source 1..20: mol_type = other RNA
ctttcctgggaactgcctac

SEQ ID NO: 3379 - RNA, 20 nt, synthetic construct
  source 1..20: mol_type = other RNA
ctttctcttggatatggatg

SEQ ID NO: 3380 - RNA, 20 nt, synthetic construct
  source 1..20: mol_type = other RNA
ctttctgccccccaccccca

SEQ ID NO: 3381 - RNA, 20 nt, synthetic construct
  source 1..20: mol_type = other RNA
ctttgaagatattctcacaa

SEQ ID NO: 3382 - RNA, 20 nt, synthetic construct
  source 1..20: mol_type = other RNA
ctttggctcgctccgccttt

SEQ ID NO: 3383 - RNA, 20 nt, synthetic construct
  source 1..20: mol_type = other RNA
ctttgggaagcagccatctg

SEQ ID NO: 3384 - RNA, 20 nt, synthetic construct
  source 1..20: mol_type = other RNA
cttttctgtcggacccttac

SEQ ID NO: 3385 - RNA, 20 nt, synthetic construct
  source 1..20: mol_type = other RNA
gaaaaacatgaaagggggag

SEQ ID NO: 3386 - RNA, 20 nt, synthetic construct
  source 1..20: mol_type = other RNA
gaaaaatattccctttatga

SEQ ID NO: 3387 - RNA, 20 nt, synthetic construct
  source 1..20: mol_type = other RNA
gaaaacacaaatggcgtatt

SEQ ID NO: 3388 - RNA, 20 nt, synthetic construct
  source 1..20: mol_type = other RNA
gaaaacgagagggaaggcgt

SEQ ID NO: 3389 - RNA, 20 nt, synthetic construct
  source 1..20: mol_type = other RNA
gaaaagagaccgaacctcac

SEQ ID NO: 3390 - RNA, 20 nt, synthetic construct
  source 1..20: mol_type = other RNA
gaaaatgctcgaaaccggac

SEQ ID NO: 3391 - RNA, 20 nt, synthetic construct
  source 1..20: mol_type = other RNA
gaaaatggggtgttgcaacg

SEQ ID NO: 3392 - RNA, 20 nt, synthetic construct
  source 1..20: mol_type = other RNA
gaaaccactgcgcggggcgc

SEQ ID NO: 3393 - RNA, 20 nt, synthetic construct
  source 1..20: mol_type = other RNA
gaaaccggacggagccattg

SEQ ID NO: 3394 - RNA, 20 nt, synthetic construct
  source 1..20: mol_type = other RNA
gaaacgccactgaccgcacg

SEQ ID NO: 3395 - RNA, 20 nt, synthetic construct
  source 1..20: mol_type = other RNA
gaaacgccgtggcgccgcgt

SEQ ID NO: 3396 - RNA, 20 nt, synthetic construct
  source 1..20: mol_type = other RNA
gaaacggccaatcggcgaca

SEQ ID NO: 3397 - RNA, 20 nt, synthetic construct
  source 1..20: mol_type = other RNA
gaaagaccactgacgcccaa

SEQ ID NO: 3398 - RNA, 20 nt, synthetic construct
  source 1..20: mol_type = other RNA
gaaagagaattcataaaggg

SEQ ID NO: 3399 - RNA, 20 nt, synthetic construct
  source 1..20: mol_type = other RNA
gaaagagccctggttcaagt

SEQ ID NO: 3400 - RNA, 20 nt, synthetic construct
  source 1..20: mol_type = other RNA
gaaagaggggggccggcact

SEQ ID NO: 3401 - RNA, 20 nt, synthetic construct
  source 1..20: mol_type = other RNA
gaaagccccttctatgctaa

SEQ ID NO: 3402 - RNA, 20 nt, synthetic construct
  source 1..20: mol_type = other RNA
gaaaggcaacccccgcaagc

SEQ ID NO: 3403 - RNA, 20 nt, synthetic construct
  source 1..20: mol_type = other RNA
gaaaggcggagcgagccaaa

SEQ ID NO: 3404 - RNA, 20 nt, synthetic construct
  source 1..20: mol_type = other RNA
gaaagggggagttgggtcgc

SEQ ID NO: 3405 - RNA, 20 nt, synthetic construct
  source 1..20: mol_type = other RNA
gaaagggggtgaagaggcgt

SEQ ID NO: 3406 - RNA, 20 nt, synthetic construct
  source 1..20: mol_type = other RNA
gaaaggggtggctggatgca

SEQ ID NO: 3407 - RNA, 20 nt, synthetic construct
  source 1..20: mol_type = other RNA
gaaaggtaaacgtggagtag

SEQ ID NO: 3408 - RNA, 20 nt, synthetic construct
  source 1..20: mol_type = other RNA
gaaagttaaactgttgggaa

SEQ ID NO: 3409 - RNA, 20 nt, synthetic construct
  source 1..20: mol_type = other RNA
gaaatcggctctggcgcggg

SEQ ID NO: 3410 - RNA, 20 nt, synthetic construct
  source 1..20: mol_type = other RNA
gaacataatgtttgttacgt

SEQ ID NO: 3411 - RNA, 20 nt, synthetic construct
  source 1..20: mol_type = other RNA
gaaccagggctctttcctac

SEQ ID NO: 3412 - RNA, 20 nt, synthetic construct
  source 1..20: mol_type = other RNA
gaaccctacacattcaacga

SEQ ID NO: 3413 - RNA, 20 nt, synthetic construct
  source 1..20: mol_type = other RNA
gaacctcacgatcgggcccc

SEQ ID NO: 3414 - RNA, 20 nt, synthetic construct
  source 1..20: mol_type = other RNA
gaacgatcttgtgagaatat

SEQ ID NO: 3415 - RNA, 20 nt, synthetic construct
  source 1..20: mol_type = other RNA
gaacgggggtagggagtggg

SEQ ID NO: 3416 - RNA, 20 nt, synthetic construct
  source 1..20: mol_type = other RNA
gaacgtgtggtgggggtggc

SEQ ID NO: 3417 - RNA, 20 nt, synthetic construct
  source 1..20: mol_type = other RNA
gaactctggtgggaggggag

SEQ ID NO: 3418 - RNA, 20 nt, synthetic construct
  source 1..20: mol_type = other RNA
gaactgcctactccacgttt

SEQ ID NO: 3419 - RNA, 20 nt, synthetic construct
  source 1..20: mol_type = other RNA
gaagacaagcaggcggcggg

SEQ ID NO: 3420 - RNA, 20 nt, synthetic construct
  source 1..20: mol_type = other RNA
gaagaggagtgtaggaaaga

SEQ ID NO: 3421 - RNA, 20 nt, synthetic construct
  source 1..20: mol_type = other RNA
gaagaggcgttgggggaggg

SEQ ID NO: 3422 - RNA, 20 nt, synthetic construct
  source 1..20: mol_type = other RNA
gaagaggctgtgcttcggcg

SEQ ID NO: 3423 - RNA, 20 nt, synthetic construct
  source 1..20: mol_type = other RNA
gaagatattctcacaagatc

SEQ ID NO: 3424 - RNA, 20 nt, synthetic construct
  source 1..20: mol_type = other RNA
gaagattacggaggggagat

SEQ ID NO: 3425 - RNA, 20 nt, synthetic construct
  source 1..20: mol_type = other RNA
gaagcacagcctcttctcta

SEQ ID NO: 3426 - RNA, 20 nt, synthetic construct
  source 1..20: mol_type = other RNA
gaagcagccatctgaggtgg

SEQ ID NO: 3427 - RNA, 20 nt, synthetic construct
  source 1..20: mol_type = other RNA
gaagccagaaaacgagaggg

SEQ ID NO: 3428 - RNA, 20 nt, synthetic construct
  source 1..20: mol_type = other RNA
gaagccgccggggccgccta

SEQ ID NO: 3429 - RNA, 20 nt, synthetic construct
  source 1..20: mol_type = other RNA
gaagcgctcctccctctgcg

SEQ ID NO: 3430 - RNA, 20 nt, synthetic construct
  source 1..20: mol_type = other RNA
gaagcgtcctgacccaggaa

SEQ ID NO: 3431 - RNA, 20 nt, synthetic construct
  source 1..20: mol_type = other RNA
gaagctgtgggaccgggccc

SEQ ID NO: 3432 - RNA, 20 nt, synthetic construct
  source 1..20: mol_type = other RNA
gaaggaaggggagggtggga

SEQ ID NO: 3433 - RNA, 20 nt, synthetic construct
  source 1..20: mol_type = other RNA
gaaggcgtccaggaagatta

SEQ ID NO: 3434 - RNA, 20 nt, synthetic construct
  source 1..20: mol_type = other RNA
gaagggagcggaaaatgctc

SEQ ID NO: 3435 - RNA, 20 nt, synthetic construct
  source 1..20: mol_type = other RNA
gaagggcgagacaagcccga

SEQ ID NO: 3436 - RNA, 20 nt, synthetic construct
  source 1..20: mol_type = other RNA
gaaggggagggtgggaggac

SEQ ID NO: 3437 - RNA, 20 nt, synthetic construct
  source 1..20: mol_type = other RNA
gaaggggctttcccaacagt

SEQ ID NO: 3438 - RNA, 20 nt, synthetic construct
  source 1..20: mol_type = other RNA
gaagggtcacctcctccgtc

SEQ ID NO: 3439 - RNA, 20 nt, synthetic construct
  source 1..20: mol_type = other RNA
gaaggtaatgcctttgggaa

SEQ ID NO: 3440 - RNA, 20 nt, synthetic construct
  source 1..20: mol_type = other RNA
gaagtcgggaacataatgtt

SEQ ID NO: 3441 - RNA, 20 nt, synthetic construct
  source 1..20: mol_type = other RNA
gaagtgagacaagcaaggac

SEQ ID NO: 3442 - RNA, 20 nt, synthetic construct
  source 1..20: mol_type = other RNA
gaagtggcagcatcctccta

SEQ ID NO: 3443 - RNA, 20 nt, synthetic construct
  source 1..20: mol_type = other RNA
gaatacgccatttgtgtttt

SEQ ID NO: 3444 - RNA, 20 nt, synthetic construct
  source 1..20: mol_type = other RNA
gaatatcttcaaaggcagaa

SEQ ID NO: 3445 - RNA, 20 nt, synthetic construct
  source 1..20: mol_type = other RNA
gaatatttttctgcctttga

SEQ ID NO: 3446 - RNA, 20 nt, synthetic construct
  source 1..20: mol_type = other RNA
gaatcaattagcatagaagg

SEQ ID NO: 3447 - RNA, 20 nt, synthetic construct
  source 1..20: mol_type = other RNA
gaatccccgtgcggtcagtg

SEQ ID NO: 3448 - RNA, 20 nt, synthetic construct
  source 1..20: mol_type = other RNA
gaatggcccgtacccgtgag

SEQ ID NO: 3449 - RNA, 20 nt, synthetic construct
  source 1..20: mol_type = other RNA
gaatgtgaagaggagtgtag

SEQ ID NO: 3450 - RNA, 20 nt, synthetic construct
  source 1..20: mol_type = other RNA
gaatgtgtagggttcgagcc

SEQ ID NO: 3451 - RNA, 20 nt, synthetic construct
  source 1..20: mol_type = other RNA
gaattcataaagggaatatt

SEQ ID NO: 3452 - RNA, 20 nt, synthetic construct
  source 1..20: mol_type = other RNA
gaattctctttccctctgcg

SEQ ID NO: 3453 - RNA, 20 nt, synthetic construct
  source 1..20: mol_type = other RNA
gacaactctgatcgctctgg

SEQ ID NO: 3454 - RNA, 20 nt, synthetic construct
  source 1..20: mol_type = other RNA
gacaagaggctagccggaag

SEQ ID NO: 3455 - RNA, 20 nt, synthetic construct
  source 1..20: mol_type = other RNA
gacaagcaaggactctatag

SEQ ID NO: 3456 - RNA, 20 nt, synthetic construct
  source 1..20: mol_type = other RNA
gacaagcaggcggcgggtaa

SEQ ID NO: 3457 - RNA, 20 nt, synthetic construct
  source 1..20: mol_type = other RNA
gacaagcccgacctgctaca

SEQ ID NO: 3458 - RNA, 20 nt, synthetic construct
  source 1..20: mol_type = other RNA
gacaaggtaagggtccgaca

SEQ ID NO: 3459 - RNA, 20 nt, synthetic construct
  source 1..20: mol_type = other RNA
gacacaatctggctcaactc

SEQ ID NO: 3460 - RNA, 20 nt, synthetic construct
  source 1..20: mol_type = other RNA
gacacctgattggctgtcga

SEQ ID NO: 3461 - RNA, 20 nt, synthetic construct
  source 1..20: mol_type = other RNA
gacacgccccctcccgccgc

SEQ ID NO: 3462 - RNA, 20 nt, synthetic construct
  source 1..20: mol_type = other RNA
gacacgctgtggcacacgcc

SEQ ID NO: 3463 - RNA, 20 nt, synthetic construct
  source 1..20: mol_type = other RNA
gacactgcggcgctcggcct

SEQ ID NO: 3464 - RNA, 20 nt, synthetic construct
  source 1..20: mol_type = other RNA
gacagaaaagagaccgaacc

SEQ ID NO: 3465 - RNA, 20 nt, synthetic construct
  source 1..20: mol_type = other RNA
gacagacaactctgatcgct

SEQ ID NO: 3466 - RNA, 20 nt, synthetic construct
  source 1..20: mol_type = other RNA
gacagccaatcaggtgtcga

SEQ ID NO: 3467 - RNA, 20 nt, synthetic construct
  source 1..20: mol_type = other RNA
gacaggagctttactccaac

SEQ ID NO: 3468 - RNA, 20 nt, synthetic construct
  source 1..20: mol_type = other RNA
gaccactgacgcccaagaag

SEQ ID NO: 3469 - RNA, 20 nt, synthetic construct
  source 1..20: mol_type = other RNA
gacccaactccccctttcat

SEQ ID NO: 3470 - RNA, 20 nt, synthetic construct
  source 1..20: mol_type = other RNA
gacccaaggagagcgagcgc

SEQ ID NO: 3471 - RNA, 20 nt, synthetic construct
  source 1..20: mol_type = other RNA
gacccaggaaaaacatgaaa

SEQ ID NO: 3472 - RNA, 20 nt, synthetic construct
  source 1..20: mol_type = other RNA
gacccccgctcctcccccac

SEQ ID NO: 3473 - RNA, 20 nt, synthetic construct
  source 1..20: mol_type = other RNA
gacccttaccttgtcccagg

SEQ ID NO: 3474 - RNA, 20 nt, synthetic construct
  source 1..20: mol_type = other RNA
gacccttccctcccctgggg

SEQ ID NO: 3475 - RNA, 20 nt, synthetic construct
  source 1..20: mol_type = other RNA
gaccgaacctcacgatcggg

SEQ ID NO: 3476 - RNA, 20 nt, synthetic construct
  source 1..20: mol_type = other RNA
gaccgcacggggattcccag

SEQ ID NO: 3477 - RNA, 20 nt, synthetic construct
  source 1..20: mol_type = other RNA
gaccgggcccttgctactgg

SEQ ID NO: 3478 - RNA, 20 nt, synthetic construct
  source 1..20: mol_type = other RNA
gaccgtaccaacgcccgcct

SEQ ID NO: 3479 - RNA, 20 nt, synthetic construct
  source 1..20: mol_type = other RNA
gacctgctacaggcactcgt

SEQ ID NO: 3480 - RNA, 20 nt, synthetic construct
  source 1..20: mol_type = other RNA
gacgcccaagaagtgagaca

SEQ ID NO: 3481 - RNA, 20 nt, synthetic construct
  source 1..20: mol_type = other RNA
gacgcccgcgccagagccga

SEQ ID NO: 3482 - RNA, 20 nt, synthetic construct
  source 1..20: mol_type = other RNA
gacgccttccctctcgtttt

SEQ ID NO: 3483 - RNA, 20 nt, synthetic construct
  source 1..20: mol_type = other RNA
gacgcttcccctcccccaac

SEQ ID NO: 3484 - RNA, 20 nt, synthetic construct
  source 1..20: mol_type = other RNA
gacggagccattgctctcgc

SEQ ID NO: 3485 - RNA, 20 nt, synthetic construct
  source 1..20: mol_type = other RNA
gacggaggaggtgacccttc

SEQ ID NO: 3486 - RNA, 20 nt, synthetic construct
  source 1..20: mol_type = other RNA
gacggcccccctagccaccc

SEQ ID NO: 3487 - RNA, 20 nt, synthetic construct
  source 1..20: mol_type = other RNA
gacggcgtaactgacaggag

SEQ ID NO: 3488 - RNA, 20 nt, synthetic construct
  source 1..20: mol_type = other RNA
gactcacgcagccccagtcc

SEQ ID NO: 3489 - RNA, 20 nt, synthetic construct
  source 1..20: mol_type = other RNA
gactcccccgaaggaagggg

SEQ ID NO: 3490 - RNA, 20 nt, synthetic construct
  source 1..20: mol_type = other RNA
gactcgagccagtagcaagg

SEQ ID NO: 3491 - RNA, 20 nt, synthetic construct
  source 1..20: mol_type = other RNA
gactcgagttaggcccaacg

SEQ ID NO: 3492 - RNA, 20 nt, synthetic construct
  source 1..20: mol_type = other RNA
gactctatagaatcaattag

SEQ ID NO: 3493 - RNA, 20 nt, synthetic construct
  source 1..20: mol_type = other RNA
gactctcgcgttgccccctg

SEQ ID NO: 3494 - RNA, 20 nt, synthetic construct
  source 1..20: mol_type = other RNA
gactgcagcatccatatcca

SEQ ID NO: 3495 - RNA, 20 nt, synthetic construct
  source 1..20: mol_type = other RNA
gactggcgggactggggctg

SEQ ID NO: 3496 - RNA, 20 nt, synthetic construct
  source 1..20: mol_type = other RNA
gactggggctgcgtgagtct

SEQ ID NO: 3497 - RNA, 20 nt, synthetic construct
  source 1..20: mol_type = other RNA
gacttacacgcagagggaaa

SEQ ID NO: 3498 - RNA, 20 nt, synthetic construct
  source 1..20: mol_type = other RNA
gacttcccacgggaaaggca

SEQ ID NO: 3499 - RNA, 20 nt, synthetic construct
  source 1..20: mol_type = other RNA
gacttctggatggcggcggc

SEQ ID NO: 3500 - RNA, 20 nt, synthetic construct
  source 1..20: mol_type = other RNA
gagaaacggccaatcggcga

SEQ ID NO: 3501 - RNA, 20 nt, synthetic construct
  source 1..20: mol_type = other RNA
gagaaagaccactgacgccc

SEQ ID NO: 3502 - RNA, 20 nt, synthetic construct
  source 1..20: mol_type = other RNA
gagaacgatcttgtgagaat

SEQ ID NO: 3503 - RNA, 20 nt, synthetic construct
  source 1..20: mol_type = other RNA
gagaacgggggtagggagtg

SEQ ID NO: 3504 - RNA, 20 nt, synthetic construct
  source 1..20: mol_type = other RNA
gagaacgtgtggtgggggtg

SEQ ID NO: 3505 - RNA, 20 nt, synthetic construct
  source 1..20: mol_type = other RNA
gagaagaggctgtgcttcgg

SEQ ID NO: 3506 - RNA, 20 nt, synthetic construct
  source 1..20: mol_type = other RNA
gagaagggagcggaaaatgc

SEQ ID NO: 3507 - RNA, 20 nt, synthetic construct
  source 1..20: mol_type = other RNA
gagaagtggcagcatcctcc

SEQ ID NO: 3508 - RNA, 20 nt, synthetic construct
  source 1..20: mol_type = other RNA
gagaatatcttcaaaggcag

SEQ ID NO: 3509 - RNA, 20 nt, synthetic construct
  source 1..20: mol_type = other RNA
gagaattcataaagggaata

SEQ ID NO: 3510 - RNA, 20 nt, synthetic construct
  source 1..20: mol_type = other RNA
gagacaagcaaggactctat

SEQ ID NO: 3511 - RNA, 20 nt, synthetic construct
  source 1..20: mol_type = other RNA
gagacaagcccgacctgcta

SEQ ID NO: 3512 - RNA, 20 nt, synthetic construct
  source 1..20: mol_type = other RNA
gagaccgaacctcacgatcg

SEQ ID NO: 3513 - RNA, 20 nt, synthetic construct
  source 1..20: mol_type = other RNA
gagacggaggaggtgaccct

SEQ ID NO: 3514 - RNA, 20 nt, synthetic construct
  source 1..20: mol_type = other RNA
gagactcacgcagccccagt

SEQ ID NO: 3515 - RNA, 20 nt, synthetic construct
  source 1..20: mol_type = other RNA
gagactcgagccagtagcaa

SEQ ID NO: 3516 - RNA, 20 nt, synthetic construct
  source 1..20: mol_type = other RNA
gagacttctggatggcggcg

SEQ ID NO: 3517 - RNA, 20 nt, synthetic construct
  source 1..20: mol_type = other RNA
gagagagatccccctctaat

SEQ ID NO: 3518 - RNA, 20 nt, synthetic construct
  source 1..20: mol_type = other RNA
gagagatccccctctaatct

SEQ ID NO: 3519 - RNA, 20 nt, synthetic construct
  source 1..20: mol_type = other RNA
gagagcaatggctccgtccg

SEQ ID NO: 3520 - RNA, 20 nt, synthetic construct
  source 1..20: mol_type = other RNA
gagagcctcggctaggtagg

SEQ ID NO: 3521 - RNA, 20 nt, synthetic construct
  source 1..20: mol_type = other RNA
gagagcgagcgcggggagac

SEQ ID NO: 3522 - RNA, 20 nt, synthetic construct
  source 1..20: mol_type = other RNA
gagaggccaatggcgcggcg

SEQ ID NO: 3523 - RNA, 20 nt, synthetic construct
  source 1..20: mol_type = other RNA
gagaggcctcttgctgccct

SEQ ID NO: 3524 - RNA, 20 nt, synthetic construct
  source 1..20: mol_type = other RNA
gagagggaaagttaaactgt

SEQ ID NO: 3525 - RNA, 20 nt, synthetic construct
  source 1..20: mol_type = other RNA
gagagggaaggcgtccagga

SEQ ID NO: 3526 - RNA, 20 nt, synthetic construct
  source 1..20: mol_type = other RNA
gagagtcgctaagcggctgc

SEQ ID NO: 3527 - RNA, 20 nt, synthetic construct
  source 1..20: mol_type = other RNA
gagatagcctcgttgaatgt

SEQ ID NO: 3528 - RNA, 20 nt, synthetic construct
  source 1..20: mol_type = other RNA
gagatccccctctaatctag

SEQ ID NO: 3529 - RNA, 20 nt, synthetic construct
  source 1..20: mol_type = other RNA
gagatcgcggcccccagagc

SEQ ID NO: 3530 - RNA, 20 nt, synthetic construct
  source 1..20: mol_type = other RNA
gagatgctgggtgtgcgggc

SEQ ID NO: 3531 - RNA, 20 nt, synthetic construct
  source 1..20: mol_type = other RNA
gagcaatggctccgtccggt

SEQ ID NO: 3532 - RNA, 20 nt, synthetic construct
  source 1..20: mol_type = other RNA
gagcattttccgctcccttc

SEQ ID NO: 3533 - RNA, 20 nt, synthetic construct
  source 1..20: mol_type = other RNA
gagccagagaacgtgtggtg

SEQ ID NO: 3534 - RNA, 20 nt, synthetic construct
  source 1..20: mol_type = other RNA
gagccagattgtgtcgtttt

SEQ ID NO: 3535 - RNA, 20 nt, synthetic construct
  source 1..20: mol_type = other RNA
gagccagtagcaagggcccg

SEQ ID NO: 3536 - RNA, 20 nt, synthetic construct
  source 1..20: mol_type = other RNA
gagccattgctctcgcagag

SEQ ID NO: 3537 - RNA, 20 nt, synthetic construct
  source 1..20: mol_type = other RNA
gagccctggttcaagtaggt

SEQ ID NO: 3538 - RNA, 20 nt, synthetic construct
  source 1..20: mol_type = other RNA
gagccgatttcactgaccct

SEQ ID NO: 3539 - RNA, 20 nt, synthetic construct
  source 1..20: mol_type = other RNA
gagccgcggccgccgccatc

SEQ ID NO: 3540 - RNA, 20 nt, synthetic construct
  source 1..20: mol_type = other RNA
gagccggagcgccgaagcac

SEQ ID NO: 3541 - RNA, 20 nt, synthetic construct
  source 1..20: mol_type = other RNA
gagcctcggctaggtagggg

SEQ ID NO: 3542 - RNA, 20 nt, synthetic construct
  source 1..20: mol_type = other RNA
gagcctggagttgagccaga

SEQ ID NO: 3543 - RNA, 20 nt, synthetic construct
  source 1..20: mol_type = other RNA
gagcgaaaccactgcgcggg

SEQ ID NO: 3544 - RNA, 20 nt, synthetic construct
  source 1..20: mol_type = other RNA
gagcgagcgcggggagacgg

SEQ ID NO: 3545 - RNA, 20 nt, synthetic construct
  source 1..20: mol_type = other RNA
gagcgatcagagttgtctgt

SEQ ID NO: 3546 - RNA, 20 nt, synthetic construct
  source 1..20: mol_type = other RNA
gagcgccgaagcacagcctc

SEQ ID NO: 3547 - RNA, 20 nt, synthetic construct
  source 1..20: mol_type = other RNA
gagcgcggggagacggagga

SEQ ID NO: 3548 - RNA, 20 nt, synthetic construct
  source 1..20: mol_type = other RNA
gagcgcttccggctagcctc

SEQ ID NO: 3549 - RNA, 20 nt, synthetic construct
  source 1..20: mol_type = other RNA
gagcggaaaatgctcgaaac

SEQ ID NO: 3550 - RNA, 20 nt, synthetic construct
  source 1..20: mol_type = other RNA
gagcggaaacgccactgacc

SEQ ID NO: 3551 - RNA, 20 nt, synthetic construct
  source 1..20: mol_type = other RNA
gagcggaactctggtgggag

SEQ ID NO: 3552 - RNA, 20 nt, synthetic construct
  source 1..20: mol_type = other RNA
gagcggagggcagcaagagg

SEQ ID NO: 3553 - RNA, 20 nt, synthetic construct
  source 1..20: mol_type = other RNA
gagcttggggagggccaggc

SEQ ID NO: 3554 - RNA, 20 nt, synthetic construct
  source 1..20: mol_type = other RNA
gagctttactccaaccagaa

SEQ ID NO: 3555 - RNA, 20 nt, synthetic construct
  source 1..20: mol_type = other RNA
gaggaccgtaccaacgcccg

SEQ ID NO: 3556 - RNA, 20 nt, synthetic construct
  source 1..20: mol_type = other RNA
gaggacgcccgcgccagagc

SEQ ID NO: 3557 - RNA, 20 nt, synthetic construct
  source 1..20: mol_type = other RNA
gaggagaaacggccaatcgg

SEQ ID NO: 3558 - RNA, 20 nt, synthetic construct
  source 1..20: mol_type = other RNA
gaggagaggcctcttgctgc

SEQ ID NO: 3559 - RNA, 20 nt, synthetic construct
  source 1..20: mol_type = other RNA
gaggagccggagcgccgaag

SEQ ID NO: 3560 - RNA, 20 nt, synthetic construct
  source 1..20: mol_type = other RNA
gaggagcgcttccggctagc

SEQ ID NO: 3561 - RNA, 20 nt, synthetic construct
  source 1..20: mol_type = other RNA
gaggagcgggggtcggtccg

SEQ ID NO: 3562 - RNA, 20 nt, synthetic construct
  source 1..20: mol_type = other RNA
gaggaggtgacccttccctc

SEQ ID NO: 3563 - RNA, 20 nt, synthetic construct
  source 1..20: mol_type = other RNA
gaggagtgtaggaaagagcc

SEQ ID NO: 3564 - RNA, 20 nt, synthetic construct
  source 1..20: mol_type = other RNA
gaggatgctgccacttctca

SEQ ID NO: 3565 - RNA, 20 nt, synthetic construct
  source 1..20: mol_type = other RNA
gaggccgagcgccgcagtgt

SEQ ID NO: 3566 - RNA, 20 nt, synthetic construct
  source 1..20: mol_type = other RNA
gaggcctctcctcaagggaa

SEQ ID NO: 3567 - RNA, 20 nt, synthetic construct
  source 1..20: mol_type = other RNA
gaggcctcttgctgccctcc

SEQ ID NO: 3568 - RNA, 20 nt, synthetic construct
  source 1..20: mol_type = other RNA
gaggcggcaggactcgagtt

SEQ ID NO: 3569 - RNA, 20 nt, synthetic construct
  source 1..20: mol_type = other RNA
gaggcgggcgttggtacggt

SEQ ID NO: 3570 - RNA, 20 nt, synthetic construct
  source 1..20: mol_type = other RNA
gaggcgttgggggaggggaa

SEQ ID NO: 3571 - RNA, 20 nt, synthetic construct
  source 1..20: mol_type = other RNA
gaggctagccggaagcgctc

SEQ ID NO: 3572 - RNA, 20 nt, synthetic construct
  source 1..20: mol_type = other RNA
gaggctatctcagacacgct

SEQ ID NO: 3573 - RNA, 20 nt, synthetic construct
  source 1..20: mol_type = other RNA
gaggctctctgaggagccgg

SEQ ID NO: 3574 - RNA, 20 nt, synthetic construct
  source 1..20: mol_type = other RNA
gaggctgtgcttcggcgctc

SEQ ID NO: 3575 - RNA, 20 nt, synthetic construct
  source 1..20: mol_type = other RNA
gagggaaagagaattcataa

SEQ ID NO: 3576 - RNA, 20 nt, synthetic construct
  source 1..20: mol_type = other RNA
gagggaaaggggtggctgga

SEQ ID NO: 3577 - RNA, 20 nt, synthetic construct
  source 1..20: mol_type = other RNA
gagggaaagttaaactgttg

SEQ ID NO: 3578 - RNA, 20 nt, synthetic construct
  source 1..20: mol_type = other RNA
gagggaaggcgtccaggaag

SEQ ID NO: 3579 - RNA, 20 nt, synthetic construct
  source 1..20: mol_type = other RNA
gagggaagggtcacctcctc

SEQ ID NO: 3580 - RNA, 20 nt, synthetic construct
  source 1..20: mol_type = other RNA
gagggagaagggagcggaaa

SEQ ID NO: 3581 - RNA, 20 nt, synthetic construct
  source 1..20: mol_type = other RNA
gagggaggagcgcttccggc

SEQ ID NO: 3582 - RNA, 20 nt, synthetic construct
  source 1..20: mol_type = other RNA
gagggaggcccgccctgcgg

SEQ ID NO: 3583 - RNA, 20 nt, synthetic construct
  source 1..20: mol_type = other RNA
gagggcagcaagaggcctct

SEQ ID NO: 3584 - RNA, 20 nt, synthetic construct
  source 1..20: mol_type = other RNA
gagggccaggcccacgaccc

SEQ ID NO: 3585 - RNA, 20 nt, synthetic construct
  source 1..20: mol_type = other RNA
gaggggaagcgtcctgaccc

SEQ ID NO: 3586 - RNA, 20 nt, synthetic construct
  source 1..20: mol_type = other RNA
gaggggagatcgcggccccc

SEQ ID NO: 3587 - RNA, 20 nt, synthetic construct
  source 1..20: mol_type = other RNA
gaggggagggtcagtgaaat

SEQ ID NO: 3588 - RNA, 20 nt, synthetic construct
  source 1..20: mol_type = other RNA
gaggggaggtgcggtacact

SEQ ID NO: 3589 - RNA, 20 nt, synthetic construct
  source 1..20: mol_type = other RNA
gagggggagggagaagggag

SEQ ID NO: 3590 - RNA, 20 nt, synthetic construct
  source 1..20: mol_type = other RNA
gagggggatctctctccctg

SEQ ID NO: 3591 - RNA, 20 nt, synthetic construct
  source 1..20: mol_type = other RNA
gaggggggccggcactactg

SEQ ID NO: 3592 - RNA, 20 nt, synthetic construct
  source 1..20: mol_type = other RNA
gaggggggtgagaagtggca

SEQ ID NO: 3593 - RNA, 20 nt, synthetic construct
  source 1..20: mol_type = other RNA
gagggtcagtgaaatcggct

SEQ ID NO: 3594 - RNA, 20 nt, synthetic construct
  source 1..20: mol_type = other RNA
gagggtgggaggacgcccgc

SEQ ID NO: 3595 - RNA, 20 nt, synthetic construct
  source 1..20: mol_type = other RNA
gaggtgacccttccctcccc

SEQ ID NO: 3596 - RNA, 20 nt, synthetic construct
  source 1..20: mol_type = other RNA
gaggtgcggtacactggggg

SEQ ID NO: 3597 - RNA, 20 nt, synthetic construct
  source 1..20: mol_type = other RNA
gaggtgggaagccagaaaac

SEQ ID NO: 3598 - RNA, 20 nt, synthetic construct
  source 1..20: mol_type = other RNA
gaggtgggggtggggggcag

SEQ ID NO: 3599 - RNA, 20 nt, synthetic construct
  source 1..20: mol_type = other RNA
gaggttcggtctcttttctg

SEQ ID NO: 3600 - RNA, 20 nt, synthetic construct
  source 1..20: mol_type = other RNA
gagtaaagctcctgtcagtt

SEQ ID NO: 3601 - RNA, 20 nt, synthetic construct
  source 1..20: mol_type = other RNA
gagtacgcagccgcttagcg

SEQ ID NO: 3602 - RNA, 20 nt, synthetic construct
  source 1..20: mol_type = other RNA
gagtaggcagttcccaggaa

SEQ ID NO: 3603 - RNA, 20 nt, synthetic construct
  source 1..20: mol_type = other RNA
gagtcctgccgcctcccggg

SEQ ID NO: 3604 - RNA, 20 nt, synthetic construct
  source 1..20: mol_type = other RNA
gagtccttgcttgtctcact

SEQ ID NO: 3605 - RNA, 20 nt, synthetic construct
  source 1..20: mol_type = other RNA
gagtcgctaagcggctgcgt

SEQ ID NO: 3606 - RNA, 20 nt, synthetic construct
  source 1..20: mol_type = other RNA
gagtcggtttacccgccgcc

SEQ ID NO: 3607 - RNA, 20 nt, synthetic construct
  source 1..20: mol_type = other RNA
gagtctcacatgagcgaaac

SEQ ID NO: 3608 - RNA, 20 nt, synthetic construct
  source 1..20: mol_type = other RNA
gagtctctgagcgcaggcgg

SEQ ID NO: 3609 - RNA, 20 nt, synthetic construct
  source 1..20: mol_type = other RNA
gagtgcctgtagcaggtcgg

SEQ ID NO: 3610 - RNA, 20 nt, synthetic construct
  source 1..20: mol_type = other RNA
gagtgggccaatgggtgcgg

SEQ ID NO: 3611 - RNA, 20 nt, synthetic construct
  source 1..20: mol_type = other RNA
gagtgtaggaaagagccctg

SEQ ID NO: 3612 - RNA, 20 nt, synthetic construct
  source 1..20: mol_type = other RNA
gagttaggcccaacgcggcg

SEQ ID NO: 3613 - RNA, 20 nt, synthetic construct
  source 1..20: mol_type = other RNA
gagttccgctcccctaccta

SEQ ID NO: 3614 - RNA, 20 nt, synthetic construct
  source 1..20: mol_type = other RNA
gagttgagccagattgtgtc

SEQ ID NO: 3615 - RNA, 20 nt, synthetic construct
  source 1..20: mol_type = other RNA
gagttgggtcgcctagatta

SEQ ID NO: 3616 - RNA, 20 nt, synthetic construct
  source 1..20: mol_type = other RNA
gagttgtctgtcacaaggcc

SEQ ID NO: 3617 - RNA, 20 nt, synthetic construct
  source 1..20: mol_type = other RNA
gatagcctcgttgaatgtgt

SEQ ID NO: 3618 - RNA, 20 nt, synthetic construct
  source 1..20: mol_type = other RNA
gatattctcacaagatcgtt

SEQ ID NO: 3619 - RNA, 20 nt, synthetic construct
  source 1..20: mol_type = other RNA
gatcagagttgtctgtcaca

SEQ ID NO: 3620 - RNA, 20 nt, synthetic construct
  source 1..20: mol_type = other RNA
gatcccccactccctacccc

SEQ ID NO: 3621 - RNA, 20 nt, synthetic construct
  source 1..20: mol_type = other RNA
gatccccctctaatctaggc

SEQ ID NO: 3622 - RNA, 20 nt, synthetic construct
  source 1..20: mol_type = other RNA
gatcgcggcccccagagcga

SEQ ID NO: 3623 - RNA, 20 nt, synthetic construct
  source 1..20: mol_type = other RNA
gatcgctctgggggccgcga

SEQ ID NO: 3624 - RNA, 20 nt, synthetic construct
  source 1..20: mol_type = other RNA
gatcgggccccaggggaggg

SEQ ID NO: 3625 - RNA, 20 nt, synthetic construct
  source 1..20: mol_type = other RNA
gatcgtgaggttcggtctct

SEQ ID NO: 3626 - RNA, 20 nt, synthetic construct
  source 1..20: mol_type = other RNA
gatcgttctccacgcccaag

SEQ ID NO: 3627 - RNA, 20 nt, synthetic construct
  source 1..20: mol_type = other RNA
gatctcccctccgtaatctt

SEQ ID NO: 3628 - RNA, 20 nt, synthetic construct
  source 1..20: mol_type = other RNA
gatctctctccctgggaaaa

SEQ ID NO: 3629 - RNA, 20 nt, synthetic construct
  source 1..20: mol_type = other RNA
gatcttgtgagaatatcttc

SEQ ID NO: 3630 - RNA, 20 nt, synthetic construct
  source 1..20: mol_type = other RNA
gatgcaggcgggagggaggc

SEQ ID NO: 3631 - RNA, 20 nt, synthetic construct
  source 1..20: mol_type = other RNA
gatgctgccacttctcaccc

SEQ ID NO: 3632 - RNA, 20 nt, synthetic construct
  source 1..20: mol_type = other RNA
gatggctgcttcccaaaggc

SEQ ID NO: 3633 - RNA, 20 nt, synthetic construct
  source 1..20: mol_type = other RNA
gatgggtggctaggggggcc

SEQ ID NO: 3634 - RNA, 20 nt, synthetic construct
  source 1..20: mol_type = other RNA
gattacggaggggagatcgc

SEQ ID NO: 3635 - RNA, 20 nt, synthetic construct
  source 1..20: mol_type = other RNA
gattagagggggatctctct

SEQ ID NO: 3636 - RNA, 20 nt, synthetic construct
  source 1..20: mol_type = other RNA
gattcccagcgccggcgcca

SEQ ID NO: 3637 - RNA, 20 nt, synthetic construct
  source 1..20: mol_type = other RNA
gattctatagagtccttgct

SEQ ID NO: 3638 - RNA, 20 nt, synthetic construct
  source 1..20: mol_type = other RNA
gattggccgtttctcctccc

SEQ ID NO: 3639 - RNA, 20 nt, synthetic construct
  source 1..20: mol_type = other RNA
gattggcggcgagtgggcca

SEQ ID NO: 3640 - RNA, 20 nt, synthetic construct
  source 1..20: mol_type = other RNA
gattggctgtcgaagctgtg

SEQ ID NO: 3641 - RNA, 20 nt, synthetic construct
  source 1..20: mol_type = other RNA
gattgtgtcgttttacttgc

SEQ ID NO: 3642 - RNA, 20 nt, synthetic construct
  source 1..20: mol_type = other RNA
gatttacctacttgaaccag

SEQ ID NO: 3643 - RNA, 20 nt, synthetic construct
  source 1..20: mol_type = other RNA
gatttcactgaccctcccct

SEQ ID NO: 3644 - RNA, 20 nt, synthetic construct
  source 1..20: mol_type = other RNA
gcaacaccccattttcccag

SEQ ID NO: 3645 - RNA, 20 nt, synthetic construct
  source 1..20: mol_type = other RNA
gcaacccccgcaagccacca

SEQ ID NO: 3646 - RNA, 20 nt, synthetic construct
  source 1..20: mol_type = other RNA
gcaaccggagggggagggag

SEQ ID NO: 3647 - RNA, 20 nt, synthetic construct
  source 1..20: mol_type = other RNA
gcaacgcgagagtcgctaag

SEQ ID NO: 3648 - RNA, 20 nt, synthetic construct
  source 1..20: mol_type = other RNA
gcaacggtgtgtgcaaggcg

SEQ ID NO: 3649 - RNA, 20 nt, synthetic construct
  source 1..20: mol_type = other RNA
gcaacgtggcaggaagcgcg

SEQ ID NO: 3650 - RNA, 20 nt, synthetic construct
  source 1..20: mol_type = other RNA
gcaagaggcctctcctcaag

SEQ ID NO: 3651 - RNA, 20 nt, synthetic construct
  source 1..20: mol_type = other RNA
gcaagccaccagacggcccc

SEQ ID NO: 3652 - RNA, 20 nt, synthetic construct
  source 1..20: mol_type = other RNA
gcaaggactctatagaatca

SEQ ID NO: 3653 - RNA, 20 nt, synthetic construct
  source 1..20: mol_type = other RNA
gcaaggcggcgaggggggtg

SEQ ID NO: 3654 - RNA, 20 nt, synthetic construct
  source 1..20: mol_type = other RNA
gcaagggcccggtcccacag

SEQ ID NO: 3655 - RNA, 20 nt, synthetic construct
  source 1..20: mol_type = other RNA
gcaagtaaaacgacacaatc

SEQ ID NO: 3656 - RNA, 20 nt, synthetic construct
  source 1..20: mol_type = other RNA
gcaatggctccgtccggttt

SEQ ID NO: 3657 - RNA, 20 nt, synthetic construct
  source 1..20: mol_type = other RNA
gcacacaccgttgcaacacc

SEQ ID NO: 3658 - RNA, 20 nt, synthetic construct
  source 1..20: mol_type = other RNA
gcacacccagcatctctaca

SEQ ID NO: 3659 - RNA, 20 nt, synthetic construct
  source 1..20: mol_type = other RNA
gcacacgccacggggagcca

SEQ ID NO: 3660 - RNA, 20 nt, synthetic construct
  source 1..20: mol_type = other RNA
gcacagcctcttctctaggc

SEQ ID NO: 3661 - RNA, 20 nt, synthetic construct
  source 1..20: mol_type = other RNA
gcacccattggcccactcgc

SEQ ID NO: 3662 - RNA, 20 nt, synthetic construct
  source 1..20: mol_type = other RNA
gcacctcccctcccaccaga

SEQ ID NO: 3663 - RNA, 20 nt, synthetic construct
  source 1..20: mol_type = other RNA
gcacggcactcccgggaggc

SEQ ID NO: 3664 - RNA, 20 nt, synthetic construct
  source 1..20: mol_type = other RNA
gcacggggattcccagcgcc

SEQ ID NO: 3665 - RNA, 20 nt, synthetic construct
  source 1..20: mol_type = other RNA
gcactactgtgttggcggac

SEQ ID NO: 3666 - RNA, 20 nt, synthetic construct
  source 1..20: mol_type = other RNA
gcactcccgggaggcggcag

SEQ ID NO: 3667 - RNA, 20 nt, synthetic construct
  source 1..20: mol_type = other RNA
gcactcgtgggggtggggga

SEQ ID NO: 3668 - RNA, 20 nt, synthetic construct
  source 1..20: mol_type = other RNA
gcagaaaaatattcccttta

SEQ ID NO: 3669 - RNA, 20 nt, synthetic construct
  source 1..20: mol_type = other RNA
gcagaaaggcggagcgagcc

SEQ ID NO: 3670 - RNA, 20 nt, synthetic construct
  source 1..20: mol_type = other RNA
gcagagggaaagagaattca

SEQ ID NO: 3671 - RNA, 20 nt, synthetic construct
  source 1..20: mol_type = other RNA
gcagagggaggagcgcttcc

SEQ ID NO: 3672 - RNA, 20 nt, synthetic construct
  source 1..20: mol_type = other RNA
gcagcaagaggcctctcctc

SEQ ID NO: 3673 - RNA, 20 nt, synthetic construct
  source 1..20: mol_type = other RNA
gcagcatccatatccaagag

SEQ ID NO: 3674 - RNA, 20 nt, synthetic construct
  source 1..20: mol_type = other RNA
gcagcatcctcctaagagct

SEQ ID NO: 3675 - RNA, 20 nt, synthetic construct
  source 1..20: mol_type = other RNA
gcagccatctgaggtgggaa

SEQ ID NO: 3676 - RNA, 20 nt, synthetic construct
  source 1..20: mol_type = other RNA
gcagccccagtcccgccagt

SEQ ID NO: 3677 - RNA, 20 nt, synthetic construct
  source 1..20: mol_type = other RNA
gcagccgcttagcgactctc

SEQ ID NO: 3678 - RNA, 20 nt, synthetic construct
  source 1..20: mol_type = other RNA
gcagcgcctgggacaaggta

SEQ ID NO: 3679 - RNA, 20 nt, synthetic construct
  source 1..20: mol_type = other RNA
gcagcgggctgagtgagctg

SEQ ID NO: 3680 - RNA, 20 nt, synthetic construct
  source 1..20: mol_type = other RNA
gcagctcactcagcccgctg

SEQ ID NO: 3681 - RNA, 20 nt, synthetic construct
  source 1..20: mol_type = other RNA
gcaggactcgagttaggccc

SEQ ID NO: 3682 - RNA, 20 nt, synthetic construct
  source 1..20: mol_type = other RNA
gcaggcggcgggtaaaccga

SEQ ID NO: 3683 - RNA, 20 nt, synthetic construct
  source 1..20: mol_type = other RNA
gcagggccagggaaagaggg

SEQ ID NO: 3684 - RNA, 20 nt, synthetic construct
  source 1..20: mol_type = other RNA
gcagggcgggcctccctccc

SEQ ID NO: 3685 - RNA, 20 nt, synthetic construct
  source 1..20: mol_type = other RNA
gcaggtcgggcttgtctcgc

SEQ ID NO: 3686 - RNA, 20 nt, synthetic construct
  source 1..20: mol_type = other RNA
gcagtggtttcgctcatgtg

SEQ ID NO: 3687 - RNA, 20 nt, synthetic construct
  source 1..20: mol_type = other RNA
gcagtgtctggccccgcgcc

SEQ ID NO: 3688 - RNA, 20 nt, synthetic construct
  source 1..20: mol_type = other RNA
gcagttcccaggaaaggggg

SEQ ID NO: 3689 - RNA, 20 nt, synthetic construct
  source 1..20: mol_type = other RNA
gcatagaaggggctttccca

SEQ ID NO: 3690 - RNA, 20 nt, synthetic construct
  source 1..20: mol_type = other RNA
gcatccagccacccctttcc

SEQ ID NO: 3691 - RNA, 20 nt, synthetic construct
  source 1..20: mol_type = other RNA
gcatccatatccaagagaaa

SEQ ID NO: 3692 - RNA, 20 nt, synthetic construct
  source 1..20: mol_type = other RNA
gcatcctcctaagagcttgg

SEQ ID NO: 3693 - RNA, 20 nt, synthetic construct
  source 1..20: mol_type = other RNA
gcatctctacaccccaccta

SEQ ID NO: 3694 - RNA, 20 nt, synthetic construct
  source 1..20: mol_type = other RNA
gcatgagagggaaagttaaa

SEQ ID NO: 3695 - RNA, 20 nt, synthetic construct
  source 1..20: mol_type = other RNA
gcattaccttcgccaccccc

SEQ ID NO: 3696 - RNA, 20 nt, synthetic construct
  source 1..20: mol_type = other RNA
gcattttccgctcccttctc

SEQ ID NO: 3697 - RNA, 20 nt, synthetic construct
  source 1..20: mol_type = other RNA
gccaacacagtagtgccggc

SEQ ID NO: 3698 - RNA, 20 nt, synthetic construct
  source 1..20: mol_type = other RNA
gccaatcagcggaagccgcc

SEQ ID NO: 3699 - RNA, 20 nt, synthetic construct
  source 1..20: mol_type = other RNA
gccaatcaggtgtcgaagac

SEQ ID NO: 3700 - RNA, 20 nt, synthetic construct
  source 1..20: mol_type = other RNA
gccaatcggcgacaagaggc

SEQ ID NO: 3701 - RNA, 20 nt, synthetic construct
  source 1..20: mol_type = other RNA
gccaatggcgcggcgggagg

SEQ ID NO: 3702 - RNA, 20 nt, synthetic construct
  source 1..20: mol_type = other RNA
gccaatgggtgcggggcggt

SEQ ID NO: 3703 - RNA, 20 nt, synthetic construct
  source 1..20: mol_type = other RNA
gccacagcgtgtctgagata

SEQ ID NO: 3704 - RNA, 20 nt, synthetic construct
  source 1..20: mol_type = other RNA
gccaccagacggccccccta

SEQ ID NO: 3705 - RNA, 20 nt, synthetic construct
  source 1..20: mol_type = other RNA
gccacccatccccccagtgt

SEQ ID NO: 3706 - RNA, 20 nt, synthetic construct
  source 1..20: mol_type = other RNA
gccacccccaccacacgttc

SEQ ID NO: 3707 - RNA, 20 nt, synthetic construct
  source 1..20: mol_type = other RNA
gccacccccgcgccccgcgc

SEQ ID NO: 3708 - RNA, 20 nt, synthetic construct
  source 1..20: mol_type = other RNA
gccacccctttccctcccaa

SEQ ID NO: 3709 - RNA, 20 nt, synthetic construct
  source 1..20: mol_type = other RNA
gccacggcgtttcctggccg

SEQ ID NO: 3710 - RNA, 20 nt, synthetic construct
  source 1..20: mol_type = other RNA
gccacggggagccagagaac

SEQ ID NO: 3711 - RNA, 20 nt, synthetic construct
  source 1..20: mol_type = other RNA
gccactgaccgcacggggat

SEQ ID NO: 3712 - RNA, 20 nt, synthetic construct
  source 1..20: mol_type = other RNA
gccacttctcacccccctcg

SEQ ID NO: 3713 - RNA, 20 nt, synthetic construct
  source 1..20: mol_type = other RNA
gccagaaaacgagagggaag

SEQ ID NO: 3714 - RNA, 20 nt, synthetic construct
  source 1..20: mol_type = other RNA
gccagacactgcggcgctcg

SEQ ID NO: 3715 - RNA, 20 nt, synthetic construct
  source 1..20: mol_type = other RNA
gccagagaacgtgtggtggg

SEQ ID NO: 3716 - RNA, 20 nt, synthetic construct
  source 1..20: mol_type = other RNA
gccagagccgatttcactga

SEQ ID NO: 3717 - RNA, 20 nt, synthetic construct
  source 1..20: mol_type = other RNA
gccagattgtgtcgttttac

SEQ ID NO: 3718 - RNA, 20 nt, synthetic construct
  source 1..20: mol_type = other RNA
gccaggaaacgccgtggcgc

SEQ ID NO: 3719 - RNA, 20 nt, synthetic construct
  source 1..20: mol_type = other RNA
gccaggcccacgacccaagg

SEQ ID NO: 3720 - RNA, 20 nt, synthetic construct
  source 1..20: mol_type = other RNA
gccagggaaagaggggggcc

SEQ ID NO: 3721 - RNA, 20 nt, synthetic construct
  source 1..20: mol_type = other RNA
gccagtagcaagggcccggt

SEQ ID NO: 3722 - RNA, 20 nt, synthetic construct
  source 1..20: mol_type = other RNA
gccagtccgccaacacagta

SEQ ID NO: 3723 - RNA, 20 nt, synthetic construct
  source 1..20: mol_type = other RNA
gccatccagaagtctcggcc

SEQ ID NO: 3724 - RNA, 20 nt, synthetic construct
  source 1..20: mol_type = other RNA
gccatctgaggtgggaagcc

SEQ ID NO: 3725 - RNA, 20 nt, synthetic construct
  source 1..20: mol_type = other RNA
gccattcccggccaggaaac

SEQ ID NO: 3726 - RNA, 20 nt, synthetic construct
  source 1..20: mol_type = other RNA
gccattgctctcgcagaggg

SEQ ID NO: 3727 - RNA, 20 nt, synthetic construct
  source 1..20: mol_type = other RNA
gccattggcctctccgccca

SEQ ID NO: 3728 - RNA, 20 nt, synthetic construct
  source 1..20: mol_type = other RNA
gccatttgtgttttcacaca

SEQ ID NO: 3729 - RNA, 20 nt, synthetic construct
  source 1..20: mol_type = other RNA
gcccaacgcggcgccacggc

SEQ ID NO: 3730 - RNA, 20 nt, synthetic construct
  source 1..20: mol_type = other RNA
gcccaagaagtgagacaagc

SEQ ID NO: 3731 - RNA, 20 nt, synthetic construct
  source 1..20: mol_type = other RNA
gcccaaggcaagtaaaacga

SEQ ID NO: 3732 - RNA, 20 nt, synthetic construct
  source 1..20: mol_type = other RNA
gcccaccgccccgcacccat

SEQ ID NO: 3733 - RNA, 20 nt, synthetic construct
  source 1..20: mol_type = other RNA
gcccacgacccaaggagagc

SEQ ID NO: 3734 - RNA, 20 nt, synthetic construct
  source 1..20: mol_type = other RNA
gcccactcgccgccaatcag

SEQ ID NO: 3735 - RNA, 20 nt, synthetic construct
  source 1..20: mol_type = other RNA
gcccaggccccggcagcgcc

SEQ ID NO: 3736 - RNA, 20 nt, synthetic construct
  source 1..20: mol_type = other RNA
gccccacccagggggcaacg

SEQ ID NO: 3737 - RNA, 20 nt, synthetic construct
  source 1..20: mol_type = other RNA
gccccaggggagggaagggt

SEQ ID NO: 3738 - RNA, 20 nt, synthetic construct
  source 1..20: mol_type = other RNA
gccccagtcccgccagtccg

SEQ ID NO: 3739 - RNA, 20 nt, synthetic construct
  source 1..20: mol_type = other RNA
gcccccagagcgatcagagt

SEQ ID NO: 3740 - RNA, 20 nt, synthetic construct
  source 1..20: mol_type = other RNA
gccccccacccccacctcac

SEQ ID NO: 3741 - RNA, 20 nt, synthetic construct
  source 1..20: mol_type = other RNA
gcccccctagccacccatcc

SEQ ID NO: 3742 - RNA, 20 nt, synthetic construct
  source 1..20: mol_type = other RNA
gcccccctctttccctggcc

SEQ ID NO: 3743 - RNA, 20 nt, synthetic construct
  source 1..20: mol_type = other RNA
gccccctcccgccgcgccat

SEQ ID NO: 3744 - RNA, 20 nt, synthetic construct
  source 1..20: mol_type = other RNA
gccccctgggtggggcgggt

SEQ ID NO: 3745 - RNA, 20 nt, synthetic construct
  source 1..20: mol_type = other RNA
gccccgcacccattggccca

SEQ ID NO: 3746 - RNA, 20 nt, synthetic construct
  source 1..20: mol_type = other RNA
gccccgcgcagtggtttcgc

SEQ ID NO: 3747 - RNA, 20 nt, synthetic construct
  source 1..20: mol_type = other RNA
gccccggcagcgcctgggac

SEQ ID NO: 3748 - RNA, 20 nt, synthetic construct
  source 1..20: mol_type = other RNA
gccccggcggcttccgctga

SEQ ID NO: 3749 - RNA, 20 nt, synthetic construct
  source 1..20: mol_type = other RNA
gccccgggttcccaccgcct

SEQ ID NO: 3750 - RNA, 20 nt, synthetic construct
  source 1..20: mol_type = other RNA
gcccctgcgcaacgtggcag

SEQ ID NO: 3751 - RNA, 20 nt, synthetic construct
  source 1..20: mol_type = other RNA
gccccttctatgctaattga

SEQ ID NO: 3752 - RNA, 20 nt, synthetic construct
  source 1..20: mol_type = other RNA
gcccgacctgctacaggcac

SEQ ID NO: 3753 - RNA, 20 nt, synthetic construct
  source 1..20: mol_type = other RNA
gcccgagcggaaacgccact

SEQ ID NO: 3754 - RNA, 20 nt, synthetic construct
  source 1..20: mol_type = other RNA
gcccgatcgtgaggttcggt

SEQ ID NO: 3755 - RNA, 20 nt, synthetic construct
  source 1..20: mol_type = other RNA
gcccgcacacccagcatctc

SEQ ID NO: 3756 - RNA, 20 nt, synthetic construct
  source 1..20: mol_type = other RNA
gcccgcctgcgctcagagac

SEQ ID NO: 3757 - RNA, 20 nt, synthetic construct
  source 1..20: mol_type = other RNA
gcccgcgccagagccgattt

SEQ ID NO: 3758 - RNA, 20 nt, synthetic construct
  source 1..20: mol_type = other RNA
gcccgctgcccgagcggaaa

SEQ ID NO: 3759 - RNA, 20 nt, synthetic construct
  source 1..20: mol_type = other RNA
gcccggtcccacagcttcga

SEQ ID NO: 3760 - RNA, 20 nt, synthetic construct
  source 1..20: mol_type = other RNA
gcccgtacccgtgaggtggg

SEQ ID NO: 3761 - RNA, 20 nt, synthetic construct
  source 1..20: mol_type = other RNA
gccctccccaagctcttagg

SEQ ID NO: 3762 - RNA, 20 nt, synthetic construct
  source 1..20: mol_type = other RNA
gccctccgctcgaaatacac

SEQ ID NO: 3763 - RNA, 20 nt, synthetic construct
  source 1..20: mol_type = other RNA
gccctgcggcaaccggaggg

SEQ ID NO: 3764 - RNA, 20 nt, synthetic construct
  source 1..20: mol_type = other RNA
gccctggttcaagtaggtaa

SEQ ID NO: 3765 - RNA, 20 nt, synthetic construct
  source 1..20: mol_type = other RNA
gcccttcaggcggtgggaac

SEQ ID NO: 3766 - RNA, 20 nt, synthetic construct
  source 1..20: mol_type = other RNA
gcccttgctactggctcgag

SEQ ID NO: 3767 - RNA, 20 nt, synthetic construct
  source 1..20: mol_type = other RNA
gccgaagcacagcctcttct

SEQ ID NO: 3768 - RNA, 20 nt, synthetic construct
  source 1..20: mol_type = other RNA
gccgagacttctggatggcg

SEQ ID NO: 3769 - RNA, 20 nt, synthetic construct
  source 1..20: mol_type = other RNA
gccgaggctctctgaggagc

SEQ ID NO: 3770 - RNA, 20 nt, synthetic construct
  source 1..20: mol_type = other RNA
gccgattggccgtttctcct

SEQ ID NO: 3771 - RNA, 20 nt, synthetic construct
  source 1..20: mol_type = other RNA
gccgatttcactgaccctcc

SEQ ID NO: 3772 - RNA, 20 nt, synthetic construct
  source 1..20: mol_type = other RNA
gccgccaatcagcggaagcc

SEQ ID NO: 3773 - RNA, 20 nt, synthetic construct
  source 1..20: mol_type = other RNA
gccgccatccagaagtctcg

SEQ ID NO: 3774 - RNA, 20 nt, synthetic construct
  source 1..20: mol_type = other RNA
gccgcccgcctgcgctcaga

SEQ ID NO: 3775 - RNA, 20 nt, synthetic construct
  source 1..20: mol_type = other RNA
gccgccgccatccagaagtc

SEQ ID NO: 3776 - RNA, 20 nt, synthetic construct
  source 1..20: mol_type = other RNA
gccgccgcccgcctgcgctc

SEQ ID NO: 3777 - RNA, 20 nt, synthetic construct
  source 1..20: mol_type = other RNA
gccgccggggccgcctagag

SEQ ID NO: 3778 - RNA, 20 nt, synthetic construct
  source 1..20: mol_type = other RNA
gccgcctagagaagaggctg

SEQ ID NO: 3779 - RNA, 20 nt, synthetic construct
  source 1..20: mol_type = other RNA
gccgcctgcttgtcttcgac

SEQ ID NO: 3780 - RNA, 20 nt, synthetic construct
  source 1..20: mol_type = other RNA
gccgccttgcacacaccgtt

SEQ ID NO: 3781 - RNA, 20 nt, synthetic construct
  source 1..20: mol_type = other RNA
gccgcgagaacgggggtagg

SEQ ID NO: 3782 - RNA, 20 nt, synthetic construct
  source 1..20: mol_type = other RNA
gccgcgatctcccctccgta

SEQ ID NO: 3783 - RNA, 20 nt, synthetic construct
  source 1..20: mol_type = other RNA
gccgcgccattggcctctcc

SEQ ID NO: 3784 - RNA, 20 nt, synthetic construct
  source 1..20: mol_type = other RNA
gccgcgcccgcacacccagc

SEQ ID NO: 3785 - RNA, 20 nt, synthetic construct
  source 1..20: mol_type = other RNA
gccgcggccgccgccatcca

SEQ ID NO: 3786 - RNA, 20 nt, synthetic construct
  source 1..20: mol_type = other RNA
gccgcgttgggcctaactcg

SEQ ID NO: 3787 - RNA, 20 nt, synthetic construct
  source 1..20: mol_type = other RNA
gccgcttagcgactctcgcg

SEQ ID NO: 3788 - RNA, 20 nt, synthetic construct
  source 1..20: mol_type = other RNA
gccggaagcgctcctccctc

SEQ ID NO: 3789 - RNA, 20 nt, synthetic construct
  source 1..20: mol_type = other RNA
gccggagcgccgaagcacag

SEQ ID NO: 3790 - RNA, 20 nt, synthetic construct
  source 1..20: mol_type = other RNA
gccggcactactgtgttggc

SEQ ID NO: 3791 - RNA, 20 nt, synthetic construct
  source 1..20: mol_type = other RNA
gccggcccccctctttccct

SEQ ID NO: 3792 - RNA, 20 nt, synthetic construct
  source 1..20: mol_type = other RNA
gccggccgagacttctggat

SEQ ID NO: 3793 - RNA, 20 nt, synthetic construct
  source 1..20: mol_type = other RNA
gccggccgcgcccgcacacc

SEQ ID NO: 3794 - RNA, 20 nt, synthetic construct
  source 1..20: mol_type = other RNA
gccggcgctgggaatccccg

SEQ ID NO: 3795 - RNA, 20 nt, synthetic construct
  source 1..20: mol_type = other RNA
gccgggaatggcccgtaccc

SEQ ID NO: 3796 - RNA, 20 nt, synthetic construct
  source 1..20: mol_type = other RNA
gccggggccgcctagagaag

SEQ ID NO: 3797 - RNA, 20 nt, synthetic construct
  source 1..20: mol_type = other RNA
gccgtcgggagtacgcagcc

SEQ ID NO: 3798 - RNA, 20 nt, synthetic construct
  source 1..20: mol_type = other RNA
gccgtctggtggcttgcggg

SEQ ID NO: 3799 - RNA, 20 nt, synthetic construct
  source 1..20: mol_type = other RNA
gccgtggcgccgcgttgggc

SEQ ID NO: 3800 - RNA, 20 nt, synthetic construct
  source 1..20: mol_type = other RNA
gccgtgtgtgaaaacacaaa

SEQ ID NO: 3801 - RNA, 20 nt, synthetic construct
  source 1..20: mol_type = other RNA
gccgtttctcctcccgccgt

SEQ ID NO: 3802 - RNA, 20 nt, synthetic construct
  source 1..20: mol_type = other RNA
gcctaactcgagtcctgccg

SEQ ID NO: 3803 - RNA, 20 nt, synthetic construct
  source 1..20: mol_type = other RNA
gcctactccacgtttacctt

SEQ ID NO: 3804 - RNA, 20 nt, synthetic construct
  source 1..20: mol_type = other RNA
gcctagagaagaggctgtgc

SEQ ID NO: 3805 - RNA, 20 nt, synthetic construct
  source 1..20: mol_type = other RNA
gcctagattagagggggatc

SEQ ID NO: 3806 - RNA, 20 nt, synthetic construct
  source 1..20: mol_type = other RNA
gcctccagcgcgcgcttcct

SEQ ID NO: 3807 - RNA, 20 nt, synthetic construct
  source 1..20: mol_type = other RNA
gcctccctcccgcctgcatc

SEQ ID NO: 3808 - RNA, 20 nt, synthetic construct
  source 1..20: mol_type = other RNA
gcctcctgcggcgggagggg

SEQ ID NO: 3809 - RNA, 20 nt, synthetic construct
  source 1..20: mol_type = other RNA
gcctcggctaggtaggggag

SEQ ID NO: 3810 - RNA, 20 nt, synthetic construct
  source 1..20: mol_type = other RNA
gcctcggggaggaccgtacc

SEQ ID NO: 3811 - RNA, 20 nt, synthetic construct
  source 1..20: mol_type = other RNA
gcctcgttgaatgtgtaggg

SEQ ID NO: 3812 - RNA, 20 nt, synthetic construct
  source 1..20: mol_type = other RNA
gcctctccgcccaccgcccc

SEQ ID NO: 3813 - RNA, 20 nt, synthetic construct
  source 1..20: mol_type = other RNA
gcctctcctcaagggaaagg

SEQ ID NO: 3814 - RNA, 20 nt, synthetic construct
  source 1..20: mol_type = other RNA
gcctcttcaccccctttcct

SEQ ID NO: 3815 - RNA, 20 nt, synthetic construct
  source 1..20: mol_type = other RNA
gcctcttctctaggcggccc

SEQ ID NO: 3816 - RNA, 20 nt, synthetic construct
  source 1..20: mol_type = other RNA
gcctcttgctgccctccgct

SEQ ID NO: 3817 - RNA, 20 nt, synthetic construct
  source 1..20: mol_type = other RNA
gcctcttgtcgccgattggc

SEQ ID NO: 3818 - RNA, 20 nt, synthetic construct
  source 1..20: mol_type = other RNA
gcctgaagggcgagacaagc

SEQ ID NO: 3819 - RNA, 20 nt, synthetic construct
  source 1..20: mol_type = other RNA
gcctgcatccagccacccct

SEQ ID NO: 3820 - RNA, 20 nt, synthetic construct
  source 1..20: mol_type = other RNA
gcctgcgctcagagactcac

SEQ ID NO: 3821 - RNA, 20 nt, synthetic construct
  source 1..20: mol_type = other RNA
gcctgcttgtcttcgacacc

SEQ ID NO: 3822 - RNA, 20 nt, synthetic construct
  source 1..20: mol_type = other RNA
gcctggagttgagccagatt

SEQ ID NO: 3823 - RNA, 20 nt, synthetic construct
  source 1..20: mol_type = other RNA
gcctggccctccccaagctc

SEQ ID NO: 3824 - RNA, 20 nt, synthetic construct
  source 1..20: mol_type = other RNA
gcctgggacaaggtaagggt

SEQ ID NO: 3825 - RNA, 20 nt, synthetic construct
  source 1..20: mol_type = other RNA
gcctgtagcaggtcgggctt

SEQ ID NO: 3826 - RNA, 20 nt, synthetic construct
  source 1..20: mol_type = other RNA
gcctgtgtatttcgagcgga

SEQ ID NO: 3827 - RNA, 20 nt, synthetic construct
  source 1..20: mol_type = other RNA
gccttccctctcgttttctg

SEQ ID NO: 3828 - RNA, 20 nt, synthetic construct
  source 1..20: mol_type = other RNA
gccttgcacacaccgttgca

SEQ ID NO: 3829 - RNA, 20 nt, synthetic construct
  source 1..20: mol_type = other RNA
gccttgggcgtggagaacga

SEQ ID NO: 3830 - RNA, 20 nt, synthetic construct
  source 1..20: mol_type = other RNA
gccttgtgacagacaactct

SEQ ID NO: 3831 - RNA, 20 nt, synthetic construct
  source 1..20: mol_type = other RNA
gcctttcccgtgggaagtcg

SEQ ID NO: 3832 - RNA, 20 nt, synthetic construct
  source 1..20: mol_type = other RNA
gcctttctgccccccacccc

SEQ ID NO: 3833 - RNA, 20 nt, synthetic construct
  source 1..20: mol_type = other RNA
gcctttgaagatattctcac

SEQ ID NO: 3834 - RNA, 20 nt, synthetic construct
  source 1..20: mol_type = other RNA
gcctttggctcgctccgcct

SEQ ID NO: 3835 - RNA, 20 nt, synthetic construct
  source 1..20: mol_type = other RNA
gcctttgggaagcagccatc

SEQ ID NO: 3836 - RNA, 20 nt, synthetic construct
  source 1..20: mol_type = other RNA
gcgaaaccactgcgcggggc

SEQ ID NO: 3837 - RNA, 20 nt, synthetic construct
  source 1..20: mol_type = other RNA
gcgaaggtaatgcctttggg

SEQ ID NO: 3838 - RNA, 20 nt, synthetic construct
  source 1..20: mol_type = other RNA
gcgacaagaggctagccgga

SEQ ID NO: 3839 - RNA, 20 nt, synthetic construct
  source 1..20: mol_type = other RNA
gcgacccaactccccctttc

SEQ ID NO: 3840 - RNA, 20 nt, synthetic construct
  source 1..20: mol_type = other RNA
gcgactctcgcgttgccccc

SEQ ID NO: 3841 - RNA, 20 nt, synthetic construct
  source 1..20: mol_type = other RNA
gcgagaacgggggtagggag

SEQ ID NO: 3842 - RNA, 20 nt, synthetic construct
  source 1..20: mol_type = other RNA
gcgagacaagcccgacctgc

SEQ ID NO: 3843 - RNA, 20 nt, synthetic construct
  source 1..20: mol_type = other RNA
gcgagagcaatggctccgtc

SEQ ID NO: 3844 - RNA, 20 nt, synthetic construct
  source 1..20: mol_type = other RNA
gcgagagtcgctaagcggct

SEQ ID NO: 3845 - RNA, 20 nt, synthetic construct
  source 1..20: mol_type = other RNA
gcgagcgcggggagacggag

SEQ ID NO: 3846 - RNA, 20 nt, synthetic construct
  source 1..20: mol_type = other RNA
gcgaggggggtgagaagtgg

SEQ ID NO: 3847 - RNA, 20 nt, synthetic construct
  source 1..20: mol_type = other RNA
gcgagtgggccaatgggtgc

SEQ ID NO: 3848 - RNA, 20 nt, synthetic construct
  source 1..20: mol_type = other RNA
gcgatcagagttgtctgtca

SEQ ID NO: 3849 - RNA, 20 nt, synthetic construct
  source 1..20: mol_type = other RNA
gcgatctcccctccgtaatc

SEQ ID NO: 3850 - RNA, 20 nt, synthetic construct
  source 1..20: mol_type = other RNA
gcgatttacctacttgaacc

SEQ ID NO: 3851 - RNA, 20 nt, synthetic construct
  source 1..20: mol_type = other RNA
gcgcaacgtggcaggaagcg

SEQ ID NO: 3852 - RNA, 20 nt, synthetic construct
  source 1..20: mol_type = other RNA
gcgcagtggtttcgctcatg

SEQ ID NO: 3853 - RNA, 20 nt, synthetic construct
  source 1..20: mol_type = other RNA
gcgccacggcgtttcctggc

SEQ ID NO: 3854 - RNA, 20 nt, synthetic construct
  source 1..20: mol_type = other RNA
gcgccagagccgatttcact

SEQ ID NO: 3855 - RNA, 20 nt, synthetic construct
  source 1..20: mol_type = other RNA
gcgccattggcctctccgcc

SEQ ID NO: 3856 - RNA, 20 nt, synthetic construct
  source 1..20: mol_type = other RNA
gcgccccgcgcagtggtttc

SEQ ID NO: 3857 - RNA, 20 nt, synthetic construct
  source 1..20: mol_type = other RNA
gcgcccctgcgcaacgtggc

SEQ ID NO: 3858 - RNA, 20 nt, synthetic construct
  source 1..20: mol_type = other RNA
gcgcccgcacacccagcatc

SEQ ID NO: 3859 - RNA, 20 nt, synthetic construct
  source 1..20: mol_type = other RNA
gcgccgaagcacagcctctt

SEQ ID NO: 3860 - RNA, 20 nt, synthetic construct
  source 1..20: mol_type = other RNA
gcgccgcgttgggcctaact

SEQ ID NO: 3861 - RNA, 20 nt, synthetic construct
  source 1..20: mol_type = other RNA
gcgccggcgctgggaatccc

SEQ ID NO: 3862 - RNA, 20 nt, synthetic construct
  source 1..20: mol_type = other RNA
gcgcctgggacaaggtaagg

SEQ ID NO: 3863 - RNA, 20 nt, synthetic construct
  source 1..20: mol_type = other RNA
gcgcgcgcttcctgccacgt

SEQ ID NO: 3864 - RNA, 20 nt, synthetic construct
  source 1..20: mol_type = other RNA
gcgcgcttcctgccacgttg

SEQ ID NO: 3865 - RNA, 20 nt, synthetic construct
  source 1..20: mol_type = other RNA
gcgcgggcgtcctcccaccc

SEQ ID NO: 3866 - RNA, 20 nt, synthetic construct
  source 1..20: mol_type = other RNA
gcgcggggagacggaggagg

SEQ ID NO: 3867 - RNA, 20 nt, synthetic construct
  source 1..20: mol_type = other RNA
gcgctcagagactcacgcag

SEQ ID NO: 3868 - RNA, 20 nt, synthetic construct
  source 1..20: mol_type = other RNA
gcgctccggctcctcagaga

SEQ ID NO: 3869 - RNA, 20 nt, synthetic construct
  source 1..20: mol_type = other RNA
gcgctcctccctctgcgaga

SEQ ID NO: 3870 - RNA, 20 nt, synthetic construct
  source 1..20: mol_type = other RNA
gcgctcgctctccttgggtc

SEQ ID NO: 3871 - RNA, 20 nt, synthetic construct
  source 1..20: mol_type = other RNA
gcgctcggcctcggggagga

SEQ ID NO: 3872 - RNA, 20 nt, synthetic construct
  source 1..20: mol_type = other RNA
gcgctgggaatccccgtgcg

SEQ ID NO: 3873 - RNA, 20 nt, synthetic construct
  source 1..20: mol_type = other RNA
gcgcttccggctagcctctt

SEQ ID NO: 3874 - RNA, 20 nt, synthetic construct
  source 1..20: mol_type = other RNA
gcgcttcctgccacgttgcg

SEQ ID NO: 3875 - RNA, 20 nt, synthetic construct
  source 1..20: mol_type = other RNA
gcggaaaatgctcgaaaccg

SEQ ID NO: 3876 - RNA, 20 nt, synthetic construct
  source 1..20: mol_type = other RNA
gcggaaacgccactgaccgc

SEQ ID NO: 3877 - RNA, 20 nt, synthetic construct
  source 1..20: mol_type = other RNA
gcggaactctggtgggaggg

SEQ ID NO: 3878 - RNA, 20 nt, synthetic construct
  source 1..20: mol_type = other RNA
gcggaagccgccggggccgc

SEQ ID NO: 3879 - RNA, 20 nt, synthetic construct
  source 1..20: mol_type = other RNA
gcggactggcgggactgggg

SEQ ID NO: 3880 - RNA, 20 nt, synthetic construct
  source 1..20: mol_type = other RNA
gcggagaggccaatggcgcg

SEQ ID NO: 3881 - RNA, 20 nt, synthetic construct
  source 1..20: mol_type = other RNA
gcggagccgcggccgccgcc

SEQ ID NO: 3882 - RNA, 20 nt, synthetic construct
  source 1..20: mol_type = other RNA
gcggagcgagccaaaggcgg

SEQ ID NO: 3883 - RNA, 20 nt, synthetic construct
  source 1..20: mol_type = other RNA
gcggagggcagcaagaggcc

SEQ ID NO: 3884 - RNA, 20 nt, synthetic construct
  source 1..20: mol_type = other RNA
gcggcaaccggagggggagg

SEQ ID NO: 3885 - RNA, 20 nt, synthetic construct
  source 1..20: mol_type = other RNA
gcggcagctcactcagcccg

SEQ ID NO: 3886 - RNA, 20 nt, synthetic construct
  source 1..20: mol_type = other RNA
gcggcaggactcgagttagg

SEQ ID NO: 3887 - RNA, 20 nt, synthetic construct
  source 1..20: mol_type = other RNA
gcggcccccagagcgatcag

SEQ ID NO: 3888 - RNA, 20 nt, synthetic construct
  source 1..20: mol_type = other RNA
gcggccccggcggcttccgc

SEQ ID NO: 3889 - RNA, 20 nt, synthetic construct
  source 1..20: mol_type = other RNA
gcggccgccgccatccagaa

SEQ ID NO: 3890 - RNA, 20 nt, synthetic construct
  source 1..20: mol_type = other RNA
gcggccttgtgacagacaac

SEQ ID NO: 3891 - RNA, 20 nt, synthetic construct
  source 1..20: mol_type = other RNA
gcggcgaggggggtgagaag

SEQ ID NO: 3892 - RNA, 20 nt, synthetic construct
  source 1..20: mol_type = other RNA
gcggcgagtgggccaatggg

SEQ ID NO: 3893 - RNA, 20 nt, synthetic construct
  source 1..20: mol_type = other RNA
gcggcgccacggcgtttcct

SEQ ID NO: 3894 - RNA, 20 nt, synthetic construct
  source 1..20: mol_type = other RNA
gcggcgctcggcctcgggga

SEQ ID NO: 3895 - RNA, 20 nt, synthetic construct
  source 1..20: mol_type = other RNA
gcggcggcagctcactcagc

SEQ ID NO: 3896 - RNA, 20 nt, synthetic construct
  source 1..20: mol_type = other RNA
gcggcggcggcagctcactc

SEQ ID NO: 3897 - RNA, 20 nt, synthetic construct
  source 1..20: mol_type = other RNA
gcggcgggaggggagggtca

SEQ ID NO: 3898 - RNA, 20 nt, synthetic construct
  source 1..20: mol_type = other RNA
gcggcgggtaaaccgactcc

SEQ ID NO: 3899 - RNA, 20 nt, synthetic construct
  source 1..20: mol_type = other RNA
gcggctgcgtactcccgacg

SEQ ID NO: 3900 - RNA, 20 nt, synthetic construct
  source 1..20: mol_type = other RNA
gcggcttccgctgattggcg

SEQ ID NO: 3901 - RNA, 20 nt, synthetic construct
  source 1..20: mol_type = other RNA
gcgggactggggctgcgtga

SEQ ID NO: 3902 - RNA, 20 nt, synthetic construct
  source 1..20: mol_type = other RNA
gcgggaggagaaacggccaa

SEQ ID NO: 3903 - RNA, 20 nt, synthetic construct
  source 1..20: mol_type = other RNA
gcgggaggggagggtcagtg

SEQ ID NO: 3904 - RNA, 20 nt, synthetic construct
  source 1..20: mol_type = other RNA
gcgggcctccctcccgcctg

SEQ ID NO: 3905 - RNA, 20 nt, synthetic construct
  source 1..20: mol_type = other RNA
gcgggcgtcctcccaccctc

SEQ ID NO: 3906 - RNA, 20 nt, synthetic construct
  source 1..20: mol_type = other RNA
gcgggcgttggtacggtcct

SEQ ID NO: 3907 - RNA, 20 nt, synthetic construct
  source 1..20: mol_type = other RNA
gcgggctgccggccgagact

SEQ ID NO: 3908 - RNA, 20 nt, synthetic construct
  source 1..20: mol_type = other RNA
gcggggagacggaggaggtg

SEQ ID NO: 3909 - RNA, 20 nt, synthetic construct
  source 1..20: mol_type = other RNA
gcggggaggcgggcgttggt

SEQ ID NO: 3910 - RNA, 20 nt, synthetic construct
  source 1..20: mol_type = other RNA
gcggggcggtgggcggagag

SEQ ID NO: 3911 - RNA, 20 nt, synthetic construct
  source 1..20: mol_type = other RNA
gcgggggttgcctttcccgt

SEQ ID NO: 3912 - RNA, 20 nt, synthetic construct
  source 1..20: mol_type = other RNA
gcgggtaaaccgactccccc

SEQ ID NO: 3913 - RNA, 20 nt, synthetic construct
  source 1..20: mol_type = other RNA
gcgggtaggtaggtggggtg

SEQ ID NO: 3914 - RNA, 20 nt, synthetic construct
  source 1..20: mol_type = other RNA
gcggtacactggggggatgg

SEQ ID NO: 3915 - RNA, 20 nt, synthetic construct
  source 1..20: mol_type = other RNA
gcggtcagtggcgtttccgc

SEQ ID NO: 3916 - RNA, 20 nt, synthetic construct
  source 1..20: mol_type = other RNA
gcggtgggcggagaggccaa

SEQ ID NO: 3917 - RNA, 20 nt, synthetic construct
  source 1..20: mol_type = other RNA
gcgtaactgacaggagcttt

SEQ ID NO: 3918 - RNA, 20 nt, synthetic construct
  source 1..20: mol_type = other RNA
gcgtactcccgacggcgtaa

SEQ ID NO: 3919 - RNA, 20 nt, synthetic construct
  source 1..20: mol_type = other RNA
gcgtattctggttggagtaa

SEQ ID NO: 3920 - RNA, 20 nt, synthetic construct
  source 1..20: mol_type = other RNA
gcgtcagtggtctttctctt

SEQ ID NO: 3921 - RNA, 20 nt, synthetic construct
  source 1..20: mol_type = other RNA
gcgtccaggaagattacgga

SEQ ID NO: 3922 - RNA, 20 nt, synthetic construct
  source 1..20: mol_type = other RNA
gcgtcctcccaccctcccct

SEQ ID NO: 3923 - RNA, 20 nt, synthetic construct
  source 1..20: mol_type = other RNA
gcgtcctgacccaggaaaaa

SEQ ID NO: 3924 - RNA, 20 nt, synthetic construct
  source 1..20: mol_type = other RNA
gcgtgagtctctgagcgcag

SEQ ID NO: 3925 - RNA, 20 nt, synthetic construct
  source 1..20: mol_type = other RNA
gcgtggagaacgatcttgtg

SEQ ID NO: 3926 - RNA, 20 nt, synthetic construct
  source 1..20: mol_type = other RNA
gcgtgtaagtcgggaatgtg

SEQ ID NO: 3927 - RNA, 20 nt, synthetic construct
  source 1..20: mol_type = other RNA
gcgtgtctgagatagcctcg

SEQ ID NO: 3928 - RNA, 20 nt, synthetic construct
  source 1..20: mol_type = other RNA
gcgtgtgccacagcgtgtct

SEQ ID NO: 3929 - RNA, 20 nt, synthetic construct
  source 1..20: mol_type = other RNA
gcgttgccccctgggtgggg

SEQ ID NO: 3930 - RNA, 20 nt, synthetic construct
  source 1..20: mol_type = other RNA
gcgttgggcctaactcgagt

SEQ ID NO: 3931 - RNA, 20 nt, synthetic construct
  source 1..20: mol_type = other RNA
gcgttgggggaggggaagcg

SEQ ID NO: 3932 - RNA, 20 nt, synthetic construct
  source 1..20: mol_type = other RNA
gcgttggtacggtcctcccc

SEQ ID NO: 3933 - RNA, 20 nt, synthetic construct
  source 1..20: mol_type = other RNA
gcgtttccgctcgggcagcg

SEQ ID NO: 3934 - RNA, 20 nt, synthetic construct
  source 1..20: mol_type = other RNA
gcgtttcctggccgggaatg

SEQ ID NO: 3935 - RNA, 20 nt, synthetic construct
  source 1..20: mol_type = other RNA
gctaagcggctgcgtactcc

SEQ ID NO: 3936 - RNA, 20 nt, synthetic construct
  source 1..20: mol_type = other RNA
gctaattgattctatagagt

SEQ ID NO: 3937 - RNA, 20 nt, synthetic construct
  source 1..20: mol_type = other RNA
gctacaggcactcgtggggg

SEQ ID NO: 3938 - RNA, 20 nt, synthetic construct
  source 1..20: mol_type = other RNA
gctactggctcgagtctcac

SEQ ID NO: 3939 - RNA, 20 nt, synthetic construct
  source 1..20: mol_type = other RNA
gctagccggaagcgctcctc

SEQ ID NO: 3940 - RNA, 20 nt, synthetic construct
  source 1..20: mol_type = other RNA
gctagcctcttgtcgccgat

SEQ ID NO: 3941 - RNA, 20 nt, synthetic construct
  source 1..20: mol_type = other RNA
gctaggggggccgtctggtg

SEQ ID NO: 3942 - RNA, 20 nt, synthetic construct
  source 1..20: mol_type = other RNA
gctaggtaggggagcggaac

SEQ ID NO: 3943 - RNA, 20 nt, synthetic construct
  source 1..20: mol_type = other RNA
gctatctcagacacgctgtg

SEQ ID NO: 3944 - RNA, 20 nt, synthetic construct
  source 1..20: mol_type = other RNA
gctcaactccaggctcgaac

SEQ ID NO: 3945 - RNA, 20 nt, synthetic construct
  source 1..20: mol_type = other RNA
gctcactcagcccgctgccc

SEQ ID NO: 3946 - RNA, 20 nt, synthetic construct
  source 1..20: mol_type = other RNA
gctcagagactcacgcagcc

SEQ ID NO: 3947 - RNA, 20 nt, synthetic construct
  source 1..20: mol_type = other RNA
gctcatgtgagactcgagcc

SEQ ID NO: 3948 - RNA, 20 nt, synthetic construct
  source 1..20: mol_type = other RNA
gctccccgtggcgtgtgcca

SEQ ID NO: 3949 - RNA, 20 nt, synthetic construct
  source 1..20: mol_type = other RNA
gctcccctacctagccgagg

SEQ ID NO: 3950 - RNA, 20 nt, synthetic construct
  source 1..20: mol_type = other RNA
gctcccttctccctccccct

SEQ ID NO: 3951 - RNA, 20 nt, synthetic construct
  source 1..20: mol_type = other RNA
gctccgccccgggttcccac

SEQ ID NO: 3952 - RNA, 20 nt, synthetic construct
  source 1..20: mol_type = other RNA
gctccgcctttctgcccccc

SEQ ID NO: 3953 - RNA, 20 nt, synthetic construct
  source 1..20: mol_type = other RNA
gctccggctcctcagagagc

SEQ ID NO: 3954 - RNA, 20 nt, synthetic construct
  source 1..20: mol_type = other RNA
gctccgtccggtttcgagca

SEQ ID NO: 3955 - RNA, 20 nt, synthetic construct
  source 1..20: mol_type = other RNA
gctcctcagagagcctcggc

SEQ ID NO: 3956 - RNA, 20 nt, synthetic construct
  source 1..20: mol_type = other RNA
gctcctcccccacccccacg

SEQ ID NO: 3957 - RNA, 20 nt, synthetic construct
  source 1..20: mol_type = other RNA
gctcctccctctgcgagagc

SEQ ID NO: 3958 - RNA, 20 nt, synthetic construct
  source 1..20: mol_type = other RNA
gctcctgtcagttacgccgt

SEQ ID NO: 3959 - RNA, 20 nt, synthetic construct
  source 1..20: mol_type = other RNA
gctcgaaaccggacggagcc

SEQ ID NO: 3960 - RNA, 20 nt, synthetic construct
  source 1..20: mol_type = other RNA
gctcgaaccctacacattca

SEQ ID NO: 3961 - RNA, 20 nt, synthetic construct
  source 1..20: mol_type = other RNA
gctcgagtctcacatgagcg

SEQ ID NO: 3962 - RNA, 20 nt, synthetic construct
  source 1..20: mol_type = other RNA
gctcgctccgcctttctgcc

SEQ ID NO: 3963 - RNA, 20 nt, synthetic construct
  source 1..20: mol_type = other RNA
gctcgctctccttgggtcgt

SEQ ID NO: 3964 - RNA, 20 nt, synthetic construct
  source 1..20: mol_type = other RNA
gctcggcctcggggaggacc

SEQ ID NO: 3965 - RNA, 20 nt, synthetic construct
  source 1..20: mol_type = other RNA
gctcgggcagcgggctgagt

SEQ ID NO: 3966 - RNA, 20 nt, synthetic construct
  source 1..20: mol_type = other RNA
gctctccttgggtcgtgggc

SEQ ID NO: 3967 - RNA, 20 nt, synthetic construct
  source 1..20: mol_type = other RNA
gctctcgcagagggaggagc

SEQ ID NO: 3968 - RNA, 20 nt, synthetic construct
  source 1..20: mol_type = other RNA
gctctctgaggagccggagc

SEQ ID NO: 3969 - RNA, 20 nt, synthetic construct
  source 1..20: mol_type = other RNA
gctctggcgcgggcgtcctc

SEQ ID NO: 3970 - RNA, 20 nt, synthetic construct
  source 1..20: mol_type = other RNA
gctctgggggccgcgatctc

SEQ ID NO: 3971 - RNA, 20 nt, synthetic construct
  source 1..20: mol_type = other RNA
gctcttaggaggatgctgcc

SEQ ID NO: 3972 - RNA, 20 nt, synthetic construct
  source 1..20: mol_type = other RNA
gctctttcctacactcctct

SEQ ID NO: 3973 - RNA, 20 nt, synthetic construct
  source 1..20: mol_type = other RNA
gctgattggcggcgagtggg

SEQ ID NO: 3974 - RNA, 20 nt, synthetic construct
  source 1..20: mol_type = other RNA
gctgccacttctcacccccc

SEQ ID NO: 3975 - RNA, 20 nt, synthetic construct
  source 1..20: mol_type = other RNA
gctgcccgagcggaaacgcc

SEQ ID NO: 3976 - RNA, 20 nt, synthetic construct
  source 1..20: mol_type = other RNA
gctgccctccgctcgaaata

SEQ ID NO: 3977 - RNA, 20 nt, synthetic construct
  source 1..20: mol_type = other RNA
gctgccggccgagacttctg

SEQ ID NO: 3978 - RNA, 20 nt, synthetic construct
  source 1..20: mol_type = other RNA
gctgcgtactcccgacggcg

SEQ ID NO: 3979 - RNA, 20 nt, synthetic construct
  source 1..20: mol_type = other RNA
gctgcgtgagtctctgagcg

SEQ ID NO: 3980 - RNA, 20 nt, synthetic construct
  source 1..20: mol_type = other RNA
gctgcttcccaaaggcatta

SEQ ID NO: 3981 - RNA, 20 nt, synthetic construct
  source 1..20: mol_type = other RNA
gctggatgcaggcgggaggg

SEQ ID NO: 3982 - RNA, 20 nt, synthetic construct
  source 1..20: mol_type = other RNA
gctgggaatccccgtgcggt

SEQ ID NO: 3983 - RNA, 20 nt, synthetic construct
  source 1..20: mol_type = other RNA
gctgtcgaagctgtgggacc

SEQ ID NO: 3984 - RNA, 20 nt, synthetic construct
  source 1..20: mol_type = other RNA
gctgtgcttcggcgctccgg

SEQ ID NO: 3985 - RNA, 20 nt, synthetic construct
  source 1..20: mol_type = other RNA
gctgtggcacacgccacggg

SEQ ID NO: 3986 - RNA, 20 nt, synthetic construct
  source 1..20: mol_type = other RNA
gctgtgggaccgggcccttg

SEQ ID NO: 3987 - RNA, 20 nt, synthetic construct
  source 1..20: mol_type = other RNA
gcttagcgactctcgcgttg

SEQ ID NO: 3988 - RNA, 20 nt, synthetic construct
  source 1..20: mol_type = other RNA
gcttcccaaaggcattacct

SEQ ID NO: 3989 - RNA, 20 nt, synthetic construct
  source 1..20: mol_type = other RNA
gcttcccacctcagatggct

SEQ ID NO: 3990 - RNA, 20 nt, synthetic construct
  source 1..20: mol_type = other RNA
gcttcccctcccccaacgcc

SEQ ID NO: 3991 - RNA, 20 nt, synthetic construct
  source 1..20: mol_type = other RNA
gcttccgctgattggcggcg

SEQ ID NO: 3992 - RNA, 20 nt, synthetic construct
  source 1..20: mol_type = other RNA
gcttccggctagcctcttgt

SEQ ID NO: 3993 - RNA, 20 nt, synthetic construct
  source 1..20: mol_type = other RNA
gcttcctgccacgttgcgca

SEQ ID NO: 3994 - RNA, 20 nt, synthetic construct
  source 1..20: mol_type = other RNA
gcttcgacagccaatcaggt

SEQ ID NO: 3995 - RNA, 20 nt, synthetic construct
  source 1..20: mol_type = other RNA
gcttcggcgctccggctcct

SEQ ID NO: 3996 - RNA, 20 nt, synthetic construct
  source 1..20: mol_type = other RNA
gcttgcgggggttgcctttc

SEQ ID NO: 3997 - RNA, 20 nt, synthetic construct
  source 1..20: mol_type = other RNA
gcttggggagggccaggccc

SEQ ID NO: 3998 - RNA, 20 nt, synthetic construct
  source 1..20: mol_type = other RNA
gcttgtctcacttcttgggc

SEQ ID NO: 3999 - RNA, 20 nt, synthetic construct
  source 1..20: mol_type = other RNA
gcttgtctcgcccttcaggc

SEQ ID NO: 4000 - RNA, 20 nt, synthetic construct
  source 1..20: mol_type = other RNA
gcttgtcttcgacacctgat

SEQ ID NO: 4001 - RNA, 20 nt, synthetic construct
  source 1..20: mol_type = other RNA
gctttactccaaccagaata

SEQ ID NO: 4002 - RNA, 20 nt, synthetic construct
  source 1..20: mol_type = other RNA
gctttcccaacagtttaact

SEQ ID NO: 4003 - RNA, 20 nt, synthetic construct
  source 1..20: mol_type = other RNA
ggaaaaacatgaaaggggga

SEQ ID NO: 4004 - RNA, 20 nt, synthetic construct
  source 1..20: mol_type = other RNA
ggaaaatgctcgaaaccgga

SEQ ID NO: 4005 - RNA, 20 nt, synthetic construct
  source 1..20: mol_type = other RNA
ggaaaatggggtgttgcaac

SEQ ID NO: 4006 - RNA, 20 nt, synthetic construct
  source 1..20: mol_type = other RNA
ggaaacgccactgaccgcac

SEQ ID NO: 4007 - RNA, 20 nt, synthetic construct
  source 1..20: mol_type = other RNA
ggaaacgccgtggcgccgcg

SEQ ID NO: 4008 - RNA, 20 nt, synthetic construct
  source 1..20: mol_type = other RNA
ggaaagagaattcataaagg

SEQ ID NO: 4009 - RNA, 20 nt, synthetic construct
  source 1..20: mol_type = other RNA
ggaaagagccctggttcaag

SEQ ID NO: 4010 - RNA, 20 nt, synthetic construct
  source 1..20: mol_type = other RNA
ggaaagaggggggccggcac

SEQ ID NO: 4011 - RNA, 20 nt, synthetic construct
  source 1..20: mol_type = other RNA
ggaaagccccttctatgcta

SEQ ID NO: 4012 - RNA, 20 nt, synthetic construct
  source 1..20: mol_type = other RNA
ggaaaggcaacccccgcaag

SEQ ID NO: 4013 - RNA, 20 nt, synthetic construct
  source 1..20: mol_type = other RNA
ggaaagggggtgaagaggcg

SEQ ID NO: 4014 - RNA, 20 nt, synthetic construct
  source 1..20: mol_type = other RNA
ggaaaggggtggctggatgc

SEQ ID NO: 4015 - RNA, 20 nt, synthetic construct
  source 1..20: mol_type = other RNA
ggaaaggtaaacgtggagta

SEQ ID NO: 4016 - RNA, 20 nt, synthetic construct
  source 1..20: mol_type = other RNA
ggaaagttaaactgttggga

SEQ ID NO: 4017 - RNA, 20 nt, synthetic construct
  source 1..20: mol_type = other RNA
ggaacataatgtttgttacg

SEQ ID NO: 4018 - RNA, 20 nt, synthetic construct
  source 1..20: mol_type = other RNA
ggaactctggtgggagggga

SEQ ID NO: 4019 - RNA, 20 nt, synthetic construct
  source 1..20: mol_type = other RNA
ggaactgcctactccacgtt

SEQ ID NO: 4020 - RNA, 20 nt, synthetic construct
  source 1..20: mol_type = other RNA
ggaagattacggaggggaga

SEQ ID NO: 4021 - RNA, 20 nt, synthetic construct
  source 1..20: mol_type = other RNA
ggaagcagccatctgaggtg

SEQ ID NO: 4022 - RNA, 20 nt, synthetic construct
  source 1..20: mol_type = other RNA
ggaagccagaaaacgagagg

SEQ ID NO: 4023 - RNA, 20 nt, synthetic construct
  source 1..20: mol_type = other RNA
ggaagccgccggggccgcct

SEQ ID NO: 4024 - RNA, 20 nt, synthetic construct
  source 1..20: mol_type = other RNA
ggaagcgctcctccctctgc

SEQ ID NO: 4025 - RNA, 20 nt, synthetic construct
  source 1..20: mol_type = other RNA
ggaagcgtcctgacccagga

SEQ ID NO: 4026 - RNA, 20 nt, synthetic construct
  source 1..20: mol_type = other RNA
ggaaggcgtccaggaagatt

SEQ ID NO: 4027 - RNA, 20 nt, synthetic construct
  source 1..20: mol_type = other RNA
ggaaggggagggtgggagga

SEQ ID NO: 4028 - RNA, 20 nt, synthetic construct
  source 1..20: mol_type = other RNA
ggaagggtcacctcctccgt

SEQ ID NO: 4029 - RNA, 20 nt, synthetic construct
  source 1..20: mol_type = other RNA
ggaagtcgggaacataatgt

SEQ ID NO: 4030 - RNA, 20 nt, synthetic construct
  source 1..20: mol_type = other RNA
ggaatatttttctgcctttg

SEQ ID NO: 4031 - RNA, 20 nt, synthetic construct
  source 1..20: mol_type = other RNA
ggaatccccgtgcggtcagt

SEQ ID NO: 4032 - RNA, 20 nt, synthetic construct
  source 1..20: mol_type = other RNA
ggaatggcccgtacccgtga

SEQ ID NO: 4033 - RNA, 20 nt, synthetic construct
  source 1..20: mol_type = other RNA
ggaatgtgaagaggagtgta

SEQ ID NO: 4034 - RNA, 20 nt, synthetic construct
  source 1..20: mol_type = other RNA
ggacaaggtaagggtccgac

SEQ ID NO: 4035 - RNA, 20 nt, synthetic construct
  source 1..20: mol_type = other RNA
ggacacgccccctcccgccg

SEQ ID NO: 4036 - RNA, 20 nt, synthetic construct
  source 1..20: mol_type = other RNA
ggacccttaccttgtcccag

SEQ ID NO: 4037 - RNA, 20 nt, synthetic construct
  source 1..20: mol_type = other RNA
ggaccgggcccttgctactg

SEQ ID NO: 4038 - RNA, 20 nt, synthetic construct
  source 1..20: mol_type = other RNA
ggaccgtaccaacgcccgcc

SEQ ID NO: 4039 - RNA, 20 nt, synthetic construct
  source 1..20: mol_type = other RNA
ggacgcccgcgccagagccg

SEQ ID NO: 4040 - RNA, 20 nt, synthetic construct
  source 1..20: mol_type = other RNA
ggacgccttccctctcgttt

SEQ ID NO: 4041 - RNA, 20 nt, synthetic construct
  source 1..20: mol_type = other RNA
ggacgcttcccctcccccaa

SEQ ID NO: 4042 - RNA, 20 nt, synthetic construct
  source 1..20: mol_type = other RNA
ggacggagccattgctctcg

SEQ ID NO: 4043 - RNA, 20 nt, synthetic construct
  source 1..20: mol_type = other RNA
ggactcgagttaggcccaac

SEQ ID NO: 4044 - RNA, 20 nt, synthetic construct
  source 1..20: mol_type = other RNA
ggactctatagaatcaatta

SEQ ID NO: 4045 - RNA, 20 nt, synthetic construct
  source 1..20: mol_type = other RNA
ggactggcgggactggggct

SEQ ID NO: 4046 - RNA, 20 nt, synthetic construct
  source 1..20: mol_type = other RNA
ggactggggctgcgtgagtc

SEQ ID NO: 4047 - RNA, 20 nt, synthetic construct
  source 1..20: mol_type = other RNA
ggagaaacggccaatcggcg

SEQ ID NO: 4048 - RNA, 20 nt, synthetic construct
  source 1..20: mol_type = other RNA
ggagaacgatcttgtgagaa

SEQ ID NO: 4049 - RNA, 20 nt, synthetic construct
  source 1..20: mol_type = other RNA
ggagaagggagcggaaaatg

SEQ ID NO: 4050 - RNA, 20 nt, synthetic construct
  source 1..20: mol_type = other RNA
ggagacggaggaggtgaccc

SEQ ID NO: 4051 - RNA, 20 nt, synthetic construct
  source 1..20: mol_type = other RNA
ggagagagatccccctctaa

SEQ ID NO: 4052 - RNA, 20 nt, synthetic construct
  source 1..20: mol_type = other RNA
ggagagcgagcgcggggaga

SEQ ID NO: 4053 - RNA, 20 nt, synthetic construct
  source 1..20: mol_type = other RNA
ggagaggccaatggcgcggc

SEQ ID NO: 4054 - RNA, 20 nt, synthetic construct
  source 1..20: mol_type = other RNA
ggagaggcctcttgctgccc

SEQ ID NO: 4055 - RNA, 20 nt, synthetic construct
  source 1..20: mol_type = other RNA
ggagatcgcggcccccagag

SEQ ID NO: 4056 - RNA, 20 nt, synthetic construct
  source 1..20: mol_type = other RNA
ggagccagagaacgtgtggt

SEQ ID NO: 4057 - RNA, 20 nt, synthetic construct
  source 1..20: mol_type = other RNA
ggagccattgctctcgcaga

SEQ ID NO: 4058 - RNA, 20 nt, synthetic construct
  source 1..20: mol_type = other RNA
ggagccgcggccgccgccat

SEQ ID NO: 4059 - RNA, 20 nt, synthetic construct
  source 1..20: mol_type = other RNA
ggagccggagcgccgaagca

SEQ ID NO: 4060 - RNA, 20 nt, synthetic construct
  source 1..20: mol_type = other RNA
ggagcgccgaagcacagcct

SEQ ID NO: 4061 - RNA, 20 nt, synthetic construct
  source 1..20: mol_type = other RNA
ggagcgcttccggctagcct

SEQ ID NO: 4062 - RNA, 20 nt, synthetic construct
  source 1..20: mol_type = other RNA
ggagcggaaaatgctcgaaa

SEQ ID NO: 4063 - RNA, 20 nt, synthetic construct
  source 1..20: mol_type = other RNA
ggagcggaactctggtggga

SEQ ID NO: 4064 - RNA, 20 nt, synthetic construct
  source 1..20: mol_type = other RNA
ggagctttactccaaccaga

SEQ ID NO: 4065 - RNA, 20 nt, synthetic construct
  source 1..20: mol_type = other RNA
ggaggaccgtaccaacgccc

SEQ ID NO: 4066 - RNA, 20 nt, synthetic construct
  source 1..20: mol_type = other RNA
ggaggacgcccgcgccagag

SEQ ID NO: 4067 - RNA, 20 nt, synthetic construct
  source 1..20: mol_type = other RNA
ggaggagaaacggccaatcg

SEQ ID NO: 4068 - RNA, 20 nt, synthetic construct
  source 1..20: mol_type = other RNA
ggaggagcgcttccggctag

SEQ ID NO: 4069 - RNA, 20 nt, synthetic construct
  source 1..20: mol_type = other RNA
ggaggagcgggggtcggtcc

SEQ ID NO: 4070 - RNA, 20 nt, synthetic construct
  source 1..20: mol_type = other RNA
ggaggaggtgacccttccct

SEQ ID NO: 4071 - RNA, 20 nt, synthetic construct
  source 1..20: mol_type = other RNA
ggaggatgctgccacttctc

SEQ ID NO: 4072 - RNA, 20 nt, synthetic construct
  source 1..20: mol_type = other RNA
ggaggcggcaggactcgagt

SEQ ID NO: 4073 - RNA, 20 nt, synthetic construct
  source 1..20: mol_type = other RNA
ggaggcgggcgttggtacgg

SEQ ID NO: 4074 - RNA, 20 nt, synthetic construct
  source 1..20: mol_type = other RNA
ggagggaaaggggtggctgg

SEQ ID NO: 4075 - RNA, 20 nt, synthetic construct
  source 1..20: mol_type = other RNA
ggagggaagggtcacctcct

SEQ ID NO: 4076 - RNA, 20 nt, synthetic construct
  source 1..20: mol_type = other RNA
ggagggagaagggagcggaa

SEQ ID NO: 4077 - RNA, 20 nt, synthetic construct
  source 1..20: mol_type = other RNA
ggagggcagcaagaggcctc

SEQ ID NO: 4078 - RNA, 20 nt, synthetic construct
  source 1..20: mol_type = other RNA
ggagggccaggcccacgacc

SEQ ID NO: 4079 - RNA, 20 nt, synthetic construct
  source 1..20: mol_type = other RNA
ggaggggaagcgtcctgacc

SEQ ID NO: 4080 - RNA, 20 nt, synthetic construct
  source 1..20: mol_type = other RNA
ggaggggagatcgcggcccc

SEQ ID NO: 4081 - RNA, 20 nt, synthetic construct
  source 1..20: mol_type = other RNA
ggaggggagggtcagtgaaa

SEQ ID NO: 4082 - RNA, 20 nt, synthetic construct
  source 1..20: mol_type = other RNA
ggaggggaggtgcggtacac

SEQ ID NO: 4083 - RNA, 20 nt, synthetic construct
  source 1..20: mol_type = other RNA
ggagggggagggagaaggga

SEQ ID NO: 4084 - RNA, 20 nt, synthetic construct
  source 1..20: mol_type = other RNA
ggagggtcagtgaaatcggc

SEQ ID NO: 4085 - RNA, 20 nt, synthetic construct
  source 1..20: mol_type = other RNA
ggagggtgggaggacgcccg

SEQ ID NO: 4086 - RNA, 20 nt, synthetic construct
  source 1..20: mol_type = other RNA
ggaggtgacccttccctccc

SEQ ID NO: 4087 - RNA, 20 nt, synthetic construct
  source 1..20: mol_type = other RNA
ggaggtgcggtacactgggg

SEQ ID NO: 4088 - RNA, 20 nt, synthetic construct
  source 1..20: mol_type = other RNA
ggagtaaagctcctgtcagt

SEQ ID NO: 4089 - RNA, 20 nt, synthetic construct
  source 1..20: mol_type = other RNA
ggagtacgcagccgcttagc

SEQ ID NO: 4090 - RNA, 20 nt, synthetic construct
  source 1..20: mol_type = other RNA
ggagtaggcagttcccagga

SEQ ID NO: 4091 - RNA, 20 nt, synthetic construct
  source 1..20: mol_type = other RNA
ggagtcggtttacccgccgc

SEQ ID NO: 4092 - RNA, 20 nt, synthetic construct
  source 1..20: mol_type = other RNA
ggagtgtaggaaagagccct

SEQ ID NO: 4093 - RNA, 20 nt, synthetic construct
  source 1..20: mol_type = other RNA
ggagttgagccagattgtgt

SEQ ID NO: 4094 - RNA, 20 nt, synthetic construct
  source 1..20: mol_type = other RNA
ggagttgggtcgcctagatt

SEQ ID NO: 4095 - RNA, 20 nt, synthetic construct
  source 1..20: mol_type = other RNA
ggatctctctccctgggaaa

SEQ ID NO: 4096 - RNA, 20 nt, synthetic construct
  source 1..20: mol_type = other RNA
ggatgcaggcgggagggagg

SEQ ID NO: 4097 - RNA, 20 nt, synthetic construct
  source 1..20: mol_type = other RNA
ggatgctgccacttctcacc

SEQ ID NO: 4098 - RNA, 20 nt, synthetic construct
  source 1..20: mol_type = other RNA
ggatgggtggctaggggggc

SEQ ID NO: 4099 - RNA, 20 nt, synthetic construct
  source 1..20: mol_type = other RNA
ggattcccagcgccggcgcc

SEQ ID NO: 4100 - RNA, 20 nt, synthetic construct
  source 1..20: mol_type = other RNA
ggcaacccccgcaagccacc

SEQ ID NO: 4101 - RNA, 20 nt, synthetic construct
  source 1..20: mol_type = other RNA
ggcaaccggagggggaggga

SEQ ID NO: 4102 - RNA, 20 nt, synthetic construct
  source 1..20: mol_type = other RNA
ggcaacgcgagagtcgctaa

SEQ ID NO: 4103 - RNA, 20 nt, synthetic construct
  source 1..20: mol_type = other RNA
ggcaagtaaaacgacacaat

SEQ ID NO: 4104 - RNA, 20 nt, synthetic construct
  source 1..20: mol_type = other RNA
ggcacacgccacggggagcc

SEQ ID NO: 4105 - RNA, 20 nt, synthetic construct
  source 1..20: mol_type = other RNA
ggcactactgtgttggcgga

SEQ ID NO: 4106 - RNA, 20 nt, synthetic construct
  source 1..20: mol_type = other RNA
ggcactcccgggaggcggca

SEQ ID NO: 4107 - RNA, 20 nt, synthetic construct
  source 1..20: mol_type = other RNA
ggcactcgtgggggtggggg

SEQ ID NO: 4108 - RNA, 20 nt, synthetic construct
  source 1..20: mol_type = other RNA
ggcagaaaaatattcccttt

SEQ ID NO: 4109 - RNA, 20 nt, synthetic construct
  source 1..20: mol_type = other RNA
ggcagaaaggcggagcgagc

SEQ ID NO: 4110 - RNA, 20 nt, synthetic construct
  source 1..20: mol_type = other RNA
ggcagcaagaggcctctcct

SEQ ID NO: 4111 - RNA, 20 nt, synthetic construct
  source 1..20: mol_type = other RNA
ggcagcatcctcctaagagc

SEQ ID NO: 4112 - RNA, 20 nt, synthetic construct
  source 1..20: mol_type = other RNA
ggcagcgcctgggacaaggt

SEQ ID NO: 4113 - RNA, 20 nt, synthetic construct
  source 1..20: mol_type = other RNA
ggcagcgggctgagtgagct

SEQ ID NO: 4114 - RNA, 20 nt, synthetic construct
  source 1..20: mol_type = other RNA
ggcagctcactcagcccgct

SEQ ID NO: 4115 - RNA, 20 nt, synthetic construct
  source 1..20: mol_type = other RNA
ggcaggactcgagttaggcc

SEQ ID NO: 4116 - RNA, 20 nt, synthetic construct
  source 1..20: mol_type = other RNA
ggcagggccagggaaagagg

SEQ ID NO: 4117 - RNA, 20 nt, synthetic construct
  source 1..20: mol_type = other RNA
ggcagttcccaggaaagggg

SEQ ID NO: 4118 - RNA, 20 nt, synthetic construct
  source 1..20: mol_type = other RNA
ggcattaccttcgccacccc

SEQ ID NO: 4119 - RNA, 20 nt, synthetic construct
  source 1..20: mol_type = other RNA
ggccaatcggcgacaagagg

SEQ ID NO: 4120 - RNA, 20 nt, synthetic construct
  source 1..20: mol_type = other RNA
ggccaatgggtgcggggcgg

SEQ ID NO: 4121 - RNA, 20 nt, synthetic construct
  source 1..20: mol_type = other RNA
ggccagacactgcggcgctc

SEQ ID NO: 4122 - RNA, 20 nt, synthetic construct
  source 1..20: mol_type = other RNA
ggccaggaaacgccgtggcg

SEQ ID NO: 4123 - RNA, 20 nt, synthetic construct
  source 1..20: mol_type = other RNA
ggccaggcccacgacccaag

SEQ ID NO: 4124 - RNA, 20 nt, synthetic construct
  source 1..20: mol_type = other RNA
ggccagggaaagaggggggc

SEQ ID NO: 4125 - RNA, 20 nt, synthetic construct
  source 1..20: mol_type = other RNA
ggccattcccggccaggaaa

SEQ ID NO: 4126 - RNA, 20 nt, synthetic construct
  source 1..20: mol_type = other RNA
ggcccaacgcggcgccacgg

SEQ ID NO: 4127 - RNA, 20 nt, synthetic construct
  source 1..20: mol_type = other RNA
ggcccacgacccaaggagag

SEQ ID NO: 4128 - RNA, 20 nt, synthetic construct
  source 1..20: mol_type = other RNA
ggcccactcgccgccaatca

SEQ ID NO: 4129 - RNA, 20 nt, synthetic construct
  source 1..20: mol_type = other RNA
ggccccaggggagggaaggg

SEQ ID NO: 4130 - RNA, 20 nt, synthetic construct
  source 1..20: mol_type = other RNA
ggcccccagagcgatcagag

SEQ ID NO: 4131 - RNA, 20 nt, synthetic construct
  source 1..20: mol_type = other RNA
ggcccccctagccacccatc

SEQ ID NO: 4132 - RNA, 20 nt, synthetic construct
  source 1..20: mol_type = other RNA
ggcccccctctttccctggc

SEQ ID NO: 4133 - RNA, 20 nt, synthetic construct
  source 1..20: mol_type = other RNA
ggccccggcagcgcctggga

SEQ ID NO: 4134 - RNA, 20 nt, synthetic construct
  source 1..20: mol_type = other RNA
ggccccggcggcttccgctg

SEQ ID NO: 4135 - RNA, 20 nt, synthetic construct
  source 1..20: mol_type = other RNA
ggcccgatcgtgaggttcgg

SEQ ID NO: 4136 - RNA, 20 nt, synthetic construct
  source 1..20: mol_type = other RNA
ggcccggtcccacagcttcg

SEQ ID NO: 4137 - RNA, 20 nt, synthetic construct
  source 1..20: mol_type = other RNA
ggcccgtacccgtgaggtgg

SEQ ID NO: 4138 - RNA, 20 nt, synthetic construct
  source 1..20: mol_type = other RNA
ggccctccccaagctcttag

SEQ ID NO: 4139 - RNA, 20 nt, synthetic construct
  source 1..20: mol_type = other RNA
ggcccttgctactggctcga

SEQ ID NO: 4140 - RNA, 20 nt, synthetic construct
  source 1..20: mol_type = other RNA
ggccgagacttctggatggc

SEQ ID NO: 4141 - RNA, 20 nt, synthetic construct
  source 1..20: mol_type = other RNA
ggccgccgccatccagaagt

SEQ ID NO: 4142 - RNA, 20 nt, synthetic construct
  source 1..20: mol_type = other RNA
ggccgccgcccgcctgcgct

SEQ ID NO: 4143 - RNA, 20 nt, synthetic construct
  source 1..20: mol_type = other RNA
ggccgcctagagaagaggct

SEQ ID NO: 4144 - RNA, 20 nt, synthetic construct
  source 1..20: mol_type = other RNA
ggccgcgagaacgggggtag

SEQ ID NO: 4145 - RNA, 20 nt, synthetic construct
  source 1..20: mol_type = other RNA
ggccgcgatctcccctccgt

SEQ ID NO: 4146 - RNA, 20 nt, synthetic construct
  source 1..20: mol_type = other RNA
ggccgcgcccgcacacccag

SEQ ID NO: 4147 - RNA, 20 nt, synthetic construct
  source 1..20: mol_type = other RNA
ggccggcactactgtgttgg

SEQ ID NO: 4148 - RNA, 20 nt, synthetic construct
  source 1..20: mol_type = other RNA
ggccgggaatggcccgtacc

SEQ ID NO: 4149 - RNA, 20 nt, synthetic construct
  source 1..20: mol_type = other RNA
ggccgtctggtggcttgcgg

SEQ ID NO: 4150 - RNA, 20 nt, synthetic construct
  source 1..20: mol_type = other RNA
ggccgtttctcctcccgccg

SEQ ID NO: 4151 - RNA, 20 nt, synthetic construct
  source 1..20: mol_type = other RNA
ggcctaactcgagtcctgcc

SEQ ID NO: 4152 - RNA, 20 nt, synthetic construct
  source 1..20: mol_type = other RNA
ggcctccctcccgcctgcat

SEQ ID NO: 4153 - RNA, 20 nt, synthetic construct
  source 1..20: mol_type = other RNA
ggcctcctgcggcgggaggg

SEQ ID NO: 4154 - RNA, 20 nt, synthetic construct
  source 1..20: mol_type = other RNA
ggcctcggggaggaccgtac

SEQ ID NO: 4155 - RNA, 20 nt, synthetic construct
  source 1..20: mol_type = other RNA
ggcctctcctcaagggaaag

SEQ ID NO: 4156 - RNA, 20 nt, synthetic construct
  source 1..20: mol_type = other RNA
ggcctcttgctgccctccgc

SEQ ID NO: 4157 - RNA, 20 nt, synthetic construct
  source 1..20: mol_type = other RNA
ggcctggccctccccaagct

SEQ ID NO: 4158 - RNA, 20 nt, synthetic construct
  source 1..20: mol_type = other RNA
ggccttgtgacagacaactc

SEQ ID NO: 4159 - RNA, 20 nt, synthetic construct
  source 1..20: mol_type = other RNA
ggcgaaggtaatgcctttgg

SEQ ID NO: 4160 - RNA, 20 nt, synthetic construct
  source 1..20: mol_type = other RNA
ggcgacaagaggctagccgg

SEQ ID NO: 4161 - RNA, 20 nt, synthetic construct
  source 1..20: mol_type = other RNA
ggcgacccaactcccccttt

SEQ ID NO: 4162 - RNA, 20 nt, synthetic construct
  source 1..20: mol_type = other RNA
ggcgagacaagcccgacctg

SEQ ID NO: 4163 - RNA, 20 nt, synthetic construct
  source 1..20: mol_type = other RNA
ggcgaggggggtgagaagtg

SEQ ID NO: 4164 - RNA, 20 nt, synthetic construct
  source 1..20: mol_type = other RNA
ggcgagtgggccaatgggtg

SEQ ID NO: 4165 - RNA, 20 nt, synthetic construct
  source 1..20: mol_type = other RNA
ggcgccacggcgtttcctgg

SEQ ID NO: 4166 - RNA, 20 nt, synthetic construct
  source 1..20: mol_type = other RNA
ggcgccgcgttgggcctaac

SEQ ID NO: 4167 - RNA, 20 nt, synthetic construct
  source 1..20: mol_type = other RNA
ggcgcgggcgtcctcccacc

SEQ ID NO: 4168 - RNA, 20 nt, synthetic construct
  source 1..20: mol_type = other RNA
ggcgctccggctcctcagag

SEQ ID NO: 4169 - RNA, 20 nt, synthetic construct
  source 1..20: mol_type = other RNA
ggcgctcggcctcggggagg

SEQ ID NO: 4170 - RNA, 20 nt, synthetic construct
  source 1..20: mol_type = other RNA
ggcgctgggaatccccgtgc

SEQ ID NO: 4171 - RNA, 20 nt, synthetic construct
  source 1..20: mol_type = other RNA
ggcggactggcgggactggg

SEQ ID NO: 4172 - RNA, 20 nt, synthetic construct
  source 1..20: mol_type = other RNA
ggcggagaggccaatggcgc

SEQ ID NO: 4173 - RNA, 20 nt, synthetic construct
  source 1..20: mol_type = other RNA
ggcggagcgagccaaaggcg

SEQ ID NO: 4174 - RNA, 20 nt, synthetic construct
  source 1..20: mol_type = other RNA
ggcggcagctcactcagccc

SEQ ID NO: 4175 - RNA, 20 nt, synthetic construct
  source 1..20: mol_type = other RNA
ggcggcaggactcgagttag

SEQ ID NO: 4176 - RNA, 20 nt, synthetic construct
  source 1..20: mol_type = other RNA
ggcggccccggcggcttccg

SEQ ID NO: 4177 - RNA, 20 nt, synthetic construct
  source 1..20: mol_type = other RNA
ggcggcgaggggggtgagaa

SEQ ID NO: 4178 - RNA, 20 nt, synthetic construct
  source 1..20: mol_type = other RNA
ggcggcgagtgggccaatgg

SEQ ID NO: 4179 - RNA, 20 nt, synthetic construct
  source 1..20: mol_type = other RNA
ggcggcggcagctcactcag

SEQ ID NO: 4180 - RNA, 20 nt, synthetic construct
  source 1..20: mol_type = other RNA
ggcggcgggtaaaccgactc

SEQ ID NO: 4181 - RNA, 20 nt, synthetic construct
  source 1..20: mol_type = other RNA
ggcggcttccgctgattggc

SEQ ID NO: 4182 - RNA, 20 nt, synthetic construct
  source 1..20: mol_type = other RNA
ggcgggactggggctgcgtg

SEQ ID NO: 4183 - RNA, 20 nt, synthetic construct
  source 1..20: mol_type = other RNA
ggcgggaggagaaacggcca

SEQ ID NO: 4184 - RNA, 20 nt, synthetic construct
  source 1..20: mol_type = other RNA
ggcgggaggggagggtcagt

SEQ ID NO: 4185 - RNA, 20 nt, synthetic construct
  source 1..20: mol_type = other RNA
ggcgggcctccctcccgcct

SEQ ID NO: 4186 - RNA, 20 nt, synthetic construct
  source 1..20: mol_type = other RNA
ggcgggcgttggtacggtcc

SEQ ID NO: 4187 - RNA, 20 nt, synthetic construct
  source 1..20: mol_type = other RNA
ggcgggctgccggccgagac

SEQ ID NO: 4188 - RNA, 20 nt, synthetic construct
  source 1..20: mol_type = other RNA
ggcggggaggcgggcgttgg

SEQ ID NO: 4189 - RNA, 20 nt, synthetic construct
  source 1..20: mol_type = other RNA
ggcgggtaaaccgactcccc

SEQ ID NO: 4190 - RNA, 20 nt, synthetic construct
  source 1..20: mol_type = other RNA
ggcgggtaggtaggtggggt

SEQ ID NO: 4191 - RNA, 20 nt, synthetic construct
  source 1..20: mol_type = other RNA
ggcggtgggcggagaggcca

SEQ ID NO: 4192 - RNA, 20 nt, synthetic construct
  source 1..20: mol_type = other RNA
ggcgtaactgacaggagctt

SEQ ID NO: 4193 - RNA, 20 nt, synthetic construct
  source 1..20: mol_type = other RNA
ggcgtattctggttggagta

SEQ ID NO: 4194 - RNA, 20 nt, synthetic construct
  source 1..20: mol_type = other RNA
ggcgtcagtggtctttctct

SEQ ID NO: 4195 - RNA, 20 nt, synthetic construct
  source 1..20: mol_type = other RNA
ggcgtccaggaagattacgg

SEQ ID NO: 4196 - RNA, 20 nt, synthetic construct
  source 1..20: mol_type = other RNA
ggcgtcctcccaccctcccc

SEQ ID NO: 4197 - RNA, 20 nt, synthetic construct
  source 1..20: mol_type = other RNA
ggcgtggagaacgatcttgt

SEQ ID NO: 4198 - RNA, 20 nt, synthetic construct
  source 1..20: mol_type = other RNA
ggcgtgtgccacagcgtgtc

SEQ ID NO: 4199 - RNA, 20 nt, synthetic construct
  source 1..20: mol_type = other RNA
ggcgttgggggaggggaagc

SEQ ID NO: 4200 - RNA, 20 nt, synthetic construct
  source 1..20: mol_type = other RNA
ggcgttggtacggtcctccc

SEQ ID NO: 4201 - RNA, 20 nt, synthetic construct
  source 1..20: mol_type = other RNA
ggcgtttccgctcgggcagc

SEQ ID NO: 4202 - RNA, 20 nt, synthetic construct
  source 1..20: mol_type = other RNA
ggcgtttcctggccgggaat

SEQ ID NO: 4203 - RNA, 20 nt, synthetic construct
  source 1..20: mol_type = other RNA
ggctagccggaagcgctcct

SEQ ID NO: 4204 - RNA, 20 nt, synthetic construct
  source 1..20: mol_type = other RNA
ggctagcctcttgtcgccga

SEQ ID NO: 4205 - RNA, 20 nt, synthetic construct
  source 1..20: mol_type = other RNA
ggctaggggggccgtctggt

SEQ ID NO: 4206 - RNA, 20 nt, synthetic construct
  source 1..20: mol_type = other RNA
ggctaggtaggggagcggaa

SEQ ID NO: 4207 - RNA, 20 nt, synthetic construct
  source 1..20: mol_type = other RNA
ggctatctcagacacgctgt

SEQ ID NO: 4208 - RNA, 20 nt, synthetic construct
  source 1..20: mol_type = other RNA
ggctcaactccaggctcgaa

SEQ ID NO: 4209 - RNA, 20 nt, synthetic construct
  source 1..20: mol_type = other RNA
ggctccccgtggcgtgtgcc

SEQ ID NO: 4210 - RNA, 20 nt, synthetic construct
  source 1..20: mol_type = other RNA
ggctccgccccgggttccca

SEQ ID NO: 4211 - RNA, 20 nt, synthetic construct
  source 1..20: mol_type = other RNA
ggctccgtccggtttcgagc

SEQ ID NO: 4212 - RNA, 20 nt, synthetic construct
  source 1..20: mol_type = other RNA
ggctcctcagagagcctcgg

SEQ ID NO: 4213 - RNA, 20 nt, synthetic construct
  source 1..20: mol_type = other RNA
ggctcgaaccctacacattc

SEQ ID NO: 4214 - RNA, 20 nt, synthetic construct
  source 1..20: mol_type = other RNA
ggctcgagtctcacatgagc

SEQ ID NO: 4215 - RNA, 20 nt, synthetic construct
  source 1..20: mol_type = other RNA
ggctcgctccgcctttctgc

SEQ ID NO: 4216 - RNA, 20 nt, synthetic construct
  source 1..20: mol_type = other RNA
ggctctctgaggagccggag

SEQ ID NO: 4217 - RNA, 20 nt, synthetic construct
  source 1..20: mol_type = other RNA
ggctctggcgcgggcgtcct

SEQ ID NO: 4218 - RNA, 20 nt, synthetic construct
  source 1..20: mol_type = other RNA
ggctctttcctacactcctc

SEQ ID NO: 4219 - RNA, 20 nt, synthetic construct
  source 1..20: mol_type = other RNA
ggctgccggccgagacttct

SEQ ID NO: 4220 - RNA, 20 nt, synthetic construct
  source 1..20: mol_type = other RNA
ggctgcgtactcccgacggc

SEQ ID NO: 4221 - RNA, 20 nt, synthetic construct
  source 1..20: mol_type = other RNA
ggctgcgtgagtctctgagc

SEQ ID NO: 4222 - RNA, 20 nt, synthetic construct
  source 1..20: mol_type = other RNA
ggctgcttcccaaaggcatt

SEQ ID NO: 4223 - RNA, 20 nt, synthetic construct
  source 1..20: mol_type = other RNA
ggctggatgcaggcgggagg

SEQ ID NO: 4224 - RNA, 20 nt, synthetic construct
  source 1..20: mol_type = other RNA
ggctgtcgaagctgtgggac

SEQ ID NO: 4225 - RNA, 20 nt, synthetic construct
  source 1..20: mol_type = other RNA
ggctgtgcttcggcgctccg

SEQ ID NO: 4226 - RNA, 20 nt, synthetic construct
  source 1..20: mol_type = other RNA
ggcttcccacctcagatggc

SEQ ID NO: 4227 - RNA, 20 nt, synthetic construct
  source 1..20: mol_type = other RNA
ggcttccgctgattggcggc

SEQ ID NO: 4228 - RNA, 20 nt, synthetic construct
  source 1..20: mol_type = other RNA
ggcttgcgggggttgccttt

SEQ ID NO: 4229 - RNA, 20 nt, synthetic construct
  source 1..20: mol_type = other RNA
ggcttgtctcgcccttcagg

SEQ ID NO: 4230 - RNA, 20 nt, synthetic construct
  source 1..20: mol_type = other RNA
ggctttcccaacagtttaac

SEQ ID NO: 4231 - RNA, 20 nt, synthetic construct
  source 1..20: mol_type = other RNA
gggaaaatggggtgttgcaa

SEQ ID NO: 4232 - RNA, 20 nt, synthetic construct
  source 1..20: mol_type = other RNA
gggaaagagaattcataaag

SEQ ID NO: 4233 - RNA, 20 nt, synthetic construct
  source 1..20: mol_type = other RNA
gggaaagaggggggccggca

SEQ ID NO: 4234 - RNA, 20 nt, synthetic construct
  source 1..20: mol_type = other RNA
gggaaagccccttctatgct

SEQ ID NO: 4235 - RNA, 20 nt, synthetic construct
  source 1..20: mol_type = other RNA
gggaaaggcaacccccgcaa

SEQ ID NO: 4236 - RNA, 20 nt, synthetic construct
  source 1..20: mol_type = other RNA
gggaaaggggtggctggatg

SEQ ID NO: 4237 - RNA, 20 nt, synthetic construct
  source 1..20: mol_type = other RNA
gggaaaggtaaacgtggagt

SEQ ID NO: 4238 - RNA, 20 nt, synthetic construct
  source 1..20: mol_type = other RNA
gggaaagttaaactgttggg

SEQ ID NO: 4239 - RNA, 20 nt, synthetic construct
  source 1..20: mol_type = other RNA
gggaacataatgtttgttac

SEQ ID NO: 4240 - RNA, 20 nt, synthetic construct
  source 1..20: mol_type = other RNA
gggaactgcctactccacgt

SEQ ID NO: 4241 - RNA, 20 nt, synthetic construct
  source 1..20: mol_type = other RNA
gggaagcagccatctgaggt

SEQ ID NO: 4242 - RNA, 20 nt, synthetic construct
  source 1..20: mol_type = other RNA
gggaagccagaaaacgagag

SEQ ID NO: 4243 - RNA, 20 nt, synthetic construct
  source 1..20: mol_type = other RNA
gggaagcgtcctgacccagg

SEQ ID NO: 4244 - RNA, 20 nt, synthetic construct
  source 1..20: mol_type = other RNA
gggaaggcgtccaggaagat

SEQ ID NO: 4245 - RNA, 20 nt, synthetic construct
  source 1..20: mol_type = other RNA
gggaagggtcacctcctccg

SEQ ID NO: 4246 - RNA, 20 nt, synthetic construct
  source 1..20: mol_type = other RNA
gggaagtcgggaacataatg

SEQ ID NO: 4247 - RNA, 20 nt, synthetic construct
  source 1..20: mol_type = other RNA
gggaatatttttctgccttt

SEQ ID NO: 4248 - RNA, 20 nt, synthetic construct
  source 1..20: mol_type = other RNA
gggaatccccgtgcggtcag

SEQ ID NO: 4249 - RNA, 20 nt, synthetic construct
  source 1..20: mol_type = other RNA
gggaatggcccgtacccgtg

SEQ ID NO: 4250 - RNA, 20 nt, synthetic construct
  source 1..20: mol_type = other RNA
gggaatgtgaagaggagtgt

SEQ ID NO: 4251 - RNA, 20 nt, synthetic construct
  source 1..20: mol_type = other RNA
gggacaaggtaagggtccga

SEQ ID NO: 4252 - RNA, 20 nt, synthetic construct
  source 1..20: mol_type = other RNA
gggacacgccccctcccgcc

SEQ ID NO: 4253 - RNA, 20 nt, synthetic construct
  source 1..20: mol_type = other RNA
gggaccgggcccttgctact

SEQ ID NO: 4254 - RNA, 20 nt, synthetic construct
  source 1..20: mol_type = other RNA
gggactggggctgcgtgagt

SEQ ID NO: 4255 - RNA, 20 nt, synthetic construct
  source 1..20: mol_type = other RNA
gggagaagggagcggaaaat

SEQ ID NO: 4256 - RNA, 20 nt, synthetic construct
  source 1..20: mol_type = other RNA
gggagacggaggaggtgacc

SEQ ID NO: 4257 - RNA, 20 nt, synthetic construct
  source 1..20: mol_type = other RNA
gggagagagatccccctcta

SEQ ID NO: 4258 - RNA, 20 nt, synthetic construct
  source 1..20: mol_type = other RNA
gggagatcgcggcccccaga

SEQ ID NO: 4259 - RNA, 20 nt, synthetic construct
  source 1..20: mol_type = other RNA
gggagccagagaacgtgtgg

SEQ ID NO: 4260 - RNA, 20 nt, synthetic construct
  source 1..20: mol_type = other RNA
gggagcggaaaatgctcgaa

SEQ ID NO: 4261 - RNA, 20 nt, synthetic construct
  source 1..20: mol_type = other RNA
gggagcggaactctggtggg

SEQ ID NO: 4262 - RNA, 20 nt, synthetic construct
  source 1..20: mol_type = other RNA
gggaggaccgtaccaacgcc

SEQ ID NO: 4263 - RNA, 20 nt, synthetic construct
  source 1..20: mol_type = other RNA
gggaggacgcccgcgccaga

SEQ ID NO: 4264 - RNA, 20 nt, synthetic construct
  source 1..20: mol_type = other RNA
gggaggagaaacggccaatc

SEQ ID NO: 4265 - RNA, 20 nt, synthetic construct
  source 1..20: mol_type = other RNA
gggaggagcgcttccggcta

SEQ ID NO: 4266 - RNA, 20 nt, synthetic construct
  source 1..20: mol_type = other RNA
gggaggagcgggggtcggtc

SEQ ID NO: 4267 - RNA, 20 nt, synthetic construct
  source 1..20: mol_type = other RNA
gggaggcggcaggactcgag

SEQ ID NO: 4268 - RNA, 20 nt, synthetic construct
  source 1..20: mol_type = other RNA
gggaggcgggcgttggtacg

SEQ ID NO: 4269 - RNA, 20 nt, synthetic construct
  source 1..20: mol_type = other RNA
gggagggaaaggggtggctg

SEQ ID NO: 4270 - RNA, 20 nt, synthetic construct
  source 1..20: mol_type = other RNA
gggagggaagggtcacctcc

SEQ ID NO: 4271 - RNA, 20 nt, synthetic construct
  source 1..20: mol_type = other RNA
gggagggagaagggagcgga

SEQ ID NO: 4272 - RNA, 20 nt, synthetic construct
  source 1..20: mol_type = other RNA
gggagggccaggcccacgac

SEQ ID NO: 4273 - RNA, 20 nt, synthetic construct
  source 1..20: mol_type = other RNA
gggaggggaagcgtcctgac

SEQ ID NO: 4274 - RNA, 20 nt, synthetic construct
  source 1..20: mol_type = other RNA
gggaggggagggtcagtgaa

SEQ ID NO: 4275 - RNA, 20 nt, synthetic construct
  source 1..20: mol_type = other RNA
gggaggggaggtgcggtaca

SEQ ID NO: 4276 - RNA, 20 nt, synthetic construct
  source 1..20: mol_type = other RNA
gggagggtcagtgaaatcgg

SEQ ID NO: 4277 - RNA, 20 nt, synthetic construct
  source 1..20: mol_type = other RNA
gggagggtgggaggacgccc

SEQ ID NO: 4278 - RNA, 20 nt, synthetic construct
  source 1..20: mol_type = other RNA
gggaggtgcggtacactggg

SEQ ID NO: 4279 - RNA, 20 nt, synthetic construct
  source 1..20: mol_type = other RNA
gggagtacgcagccgcttag

SEQ ID NO: 4280 - RNA, 20 nt, synthetic construct
  source 1..20: mol_type = other RNA
gggagtcggtttacccgccg

SEQ ID NO: 4281 - RNA, 20 nt, synthetic construct
  source 1..20: mol_type = other RNA
gggagtgggggatcggggag

SEQ ID NO: 4282 - RNA, 20 nt, synthetic construct
  source 1..20: mol_type = other RNA
gggagttgggtcgcctagat

SEQ ID NO: 4283 - RNA, 20 nt, synthetic construct
  source 1..20: mol_type = other RNA
gggatctctctccctgggaa

SEQ ID NO: 4284 - RNA, 20 nt, synthetic construct
  source 1..20: mol_type = other RNA
gggatgggtggctagggggg

SEQ ID NO: 4285 - RNA, 20 nt, synthetic construct
  source 1..20: mol_type = other RNA
gggattcccagcgccggcgc

SEQ ID NO: 4286 - RNA, 20 nt, synthetic construct
  source 1..20: mol_type = other RNA
gggcaacgcgagagtcgcta

SEQ ID NO: 4287 - RNA, 20 nt, synthetic construct
  source 1..20: mol_type = other RNA
gggcagaaaggcggagcgag

SEQ ID NO: 4288 - RNA, 20 nt, synthetic construct
  source 1..20: mol_type = other RNA
gggcagcaagaggcctctcc

SEQ ID NO: 4289 - RNA, 20 nt, synthetic construct
  source 1..20: mol_type = other RNA
gggcagcgggctgagtgagc

SEQ ID NO: 4290 - RNA, 20 nt, synthetic construct
  source 1..20: mol_type = other RNA
gggcagggccagggaaagag

SEQ ID NO: 4291 - RNA, 20 nt, synthetic construct
  source 1..20: mol_type = other RNA
gggccagacactgcggcgct

SEQ ID NO: 4292 - RNA, 20 nt, synthetic construct
  source 1..20: mol_type = other RNA
gggccaggcccacgacccaa

SEQ ID NO: 4293 - RNA, 20 nt, synthetic construct
  source 1..20: mol_type = other RNA
gggccagggaaagagggggg

SEQ ID NO: 4294 - RNA, 20 nt, synthetic construct
  source 1..20: mol_type = other RNA
gggccattcccggccaggaa

SEQ ID NO: 4295 - RNA, 20 nt, synthetic construct
  source 1..20: mol_type = other RNA
gggccccaggggagggaagg

SEQ ID NO: 4296 - RNA, 20 nt, synthetic construct
  source 1..20: mol_type = other RNA
gggcccgatcgtgaggttcg

SEQ ID NO: 4297 - RNA, 20 nt, synthetic construct
  source 1..20: mol_type = other RNA
gggcccggtcccacagcttc

SEQ ID NO: 4298 - RNA, 20 nt, synthetic construct
  source 1..20: mol_type = other RNA
gggcccttgctactggctcg

SEQ ID NO: 4299 - RNA, 20 nt, synthetic construct
  source 1..20: mol_type = other RNA
gggccgcctagagaagaggc

SEQ ID NO: 4300 - RNA, 20 nt, synthetic construct
  source 1..20: mol_type = other RNA
gggccgcgatctcccctccg

SEQ ID NO: 4301 - RNA, 20 nt, synthetic construct
  source 1..20: mol_type = other RNA
gggccggcactactgtgttg

SEQ ID NO: 4302 - RNA, 20 nt, synthetic construct
  source 1..20: mol_type = other RNA
gggccgtctggtggcttgcg

SEQ ID NO: 4303 - RNA, 20 nt, synthetic construct
  source 1..20: mol_type = other RNA
gggcctaactcgagtcctgc

SEQ ID NO: 4304 - RNA, 20 nt, synthetic construct
  source 1..20: mol_type = other RNA
gggcctccctcccgcctgca

SEQ ID NO: 4305 - RNA, 20 nt, synthetic construct
  source 1..20: mol_type = other RNA
gggcctggccctccccaagc

SEQ ID NO: 4306 - RNA, 20 nt, synthetic construct
  source 1..20: mol_type = other RNA
gggcgagacaagcccgacct

SEQ ID NO: 4307 - RNA, 20 nt, synthetic construct
  source 1..20: mol_type = other RNA
gggcggagaggccaatggcg

SEQ ID NO: 4308 - RNA, 20 nt, synthetic construct
  source 1..20: mol_type = other RNA
gggcgggcctccctcccgcc

SEQ ID NO: 4309 - RNA, 20 nt, synthetic construct
  source 1..20: mol_type = other RNA
gggcgggctgccggccgaga

SEQ ID NO: 4310 - RNA, 20 nt, synthetic construct
  source 1..20: mol_type = other RNA
gggcgggtaggtaggtgggg

SEQ ID NO: 4311 - RNA, 20 nt, synthetic construct
  source 1..20: mol_type = other RNA
gggcggtgggcggagaggcc

SEQ ID NO: 4312 - RNA, 20 nt, synthetic construct
  source 1..20: mol_type = other RNA
gggcgtcagtggtctttctc

SEQ ID NO: 4313 - RNA, 20 nt, synthetic construct
  source 1..20: mol_type = other RNA
gggcgtcctcccaccctccc

SEQ ID NO: 4314 - RNA, 20 nt, synthetic construct
  source 1..20: mol_type = other RNA
gggcgtggagaacgatcttg

SEQ ID NO: 4315 - RNA, 20 nt, synthetic construct
  source 1..20: mol_type = other RNA
gggcgttggtacggtcctcc

SEQ ID NO: 4316 - RNA, 20 nt, synthetic construct
  source 1..20: mol_type = other RNA
gggctctttcctacactcct

SEQ ID NO: 4317 - RNA, 20 nt, synthetic construct
  source 1..20: mol_type = other RNA
gggctgccggccgagacttc

SEQ ID NO: 4318 - RNA, 20 nt, synthetic construct
  source 1..20: mol_type = other RNA
gggctgcgtgagtctctgag

SEQ ID NO: 4319 - RNA, 20 nt, synthetic construct
  source 1..20: mol_type = other RNA
gggcttgtctcgcccttcag

SEQ ID NO: 4320 - RNA, 20 nt, synthetic construct
  source 1..20: mol_type = other RNA
gggctttcccaacagtttaa

SEQ ID NO: 4321 - RNA, 20 nt, synthetic construct
  source 1..20: mol_type = other RNA
ggggaagcgtcctgacccag

SEQ ID NO: 4322 - RNA, 20 nt, synthetic construct
  source 1..20: mol_type = other RNA
ggggagacggaggaggtgac

SEQ ID NO: 4323 - RNA, 20 nt, synthetic construct
  source 1..20: mol_type = other RNA
ggggagatcgcggcccccag

SEQ ID NO: 4324 - RNA, 20 nt, synthetic construct
  source 1..20: mol_type = other RNA
ggggagccagagaacgtgtg

SEQ ID NO: 4325 - RNA, 20 nt, synthetic construct
  source 1..20: mol_type = other RNA
ggggagcggaactctggtgg

SEQ ID NO: 4326 - RNA, 20 nt, synthetic construct
  source 1..20: mol_type = other RNA
ggggaggaccgtaccaacgc

SEQ ID NO: 4327 - RNA, 20 nt, synthetic construct
  source 1..20: mol_type = other RNA
ggggaggcgggcgttggtac

SEQ ID NO: 4328 - RNA, 20 nt, synthetic construct
  source 1..20: mol_type = other RNA
ggggagggaagggtcacctc

SEQ ID NO: 4329 - RNA, 20 nt, synthetic construct
  source 1..20: mol_type = other RNA
ggggagggagaagggagcgg

SEQ ID NO: 4330 - RNA, 20 nt, synthetic construct
  source 1..20: mol_type = other RNA
ggggagggccaggcccacga

SEQ ID NO: 4331 - RNA, 20 nt, synthetic construct
  source 1..20: mol_type = other RNA
ggggaggggaagcgtcctga

SEQ ID NO: 4332 - RNA, 20 nt, synthetic construct
  source 1..20: mol_type = other RNA
ggggagggtcagtgaaatcg

SEQ ID NO: 4333 - RNA, 20 nt, synthetic construct
  source 1..20: mol_type = other RNA
ggggaggtgcggtacactgg

SEQ ID NO: 4334 - RNA, 20 nt, synthetic construct
  source 1..20: mol_type = other RNA
ggggagtcggtttacccgcc

SEQ ID NO: 4335 - RNA, 20 nt, synthetic construct
  source 1..20: mol_type = other RNA
ggggagttgggtcgcctaga

SEQ ID NO: 4336 - RNA, 20 nt, synthetic construct
  source 1..20: mol_type = other RNA
ggggatctctctccctggga

SEQ ID NO: 4337 - RNA, 20 nt, synthetic construct
  source 1..20: mol_type = other RNA
ggggatgggtggctaggggg

SEQ ID NO: 4338 - RNA, 20 nt, synthetic construct
  source 1..20: mol_type = other RNA
ggggcaacgcgagagtcgct

SEQ ID NO: 4339 - RNA, 20 nt, synthetic construct
  source 1..20: mol_type = other RNA
ggggcagaaaggcggagcga

SEQ ID NO: 4340 - RNA, 20 nt, synthetic construct
  source 1..20: mol_type = other RNA
ggggcagggccagggaaaga

SEQ ID NO: 4341 - RNA, 20 nt, synthetic construct
  source 1..20: mol_type = other RNA
ggggccagacactgcggcgc

SEQ ID NO: 4342 - RNA, 20 nt, synthetic construct
  source 1..20: mol_type = other RNA
ggggcccgatcgtgaggttc

SEQ ID NO: 4343 - RNA, 20 nt, synthetic construct
  source 1..20: mol_type = other RNA
ggggccgcctagagaagagg

SEQ ID NO: 4344 - RNA, 20 nt, synthetic construct
  source 1..20: mol_type = other RNA
ggggccgcgatctcccctcc

SEQ ID NO: 4345 - RNA, 20 nt, synthetic construct
  source 1..20: mol_type = other RNA
ggggccggcactactgtgtt

SEQ ID NO: 4346 - RNA, 20 nt, synthetic construct
  source 1..20: mol_type = other RNA
ggggccgtctggtggcttgc

SEQ ID NO: 4347 - RNA, 20 nt, synthetic construct
  source 1..20: mol_type = other RNA
ggggcgggctgccggccgag

SEQ ID NO: 4348 - RNA, 20 nt, synthetic construct
  source 1..20: mol_type = other RNA
ggggcgggtaggtaggtggg

SEQ ID NO: 4349 - RNA, 20 nt, synthetic construct
  source 1..20: mol_type = other RNA
ggggcggtgggcggagaggc

SEQ ID NO: 4350 - RNA, 20 nt, synthetic construct
  source 1..20: mol_type = other RNA
ggggctgcgtgagtctctga

SEQ ID NO: 4351 - RNA, 20 nt, synthetic construct
  source 1..20: mol_type = other RNA
ggggctttcccaacagttta

SEQ ID NO: 4352 - RNA, 20 nt, synthetic construct
  source 1..20: mol_type = other RNA
gggggagggagaagggagcg

SEQ ID NO: 4353 - RNA, 20 nt, synthetic construct
  source 1..20: mol_type = other RNA
gggggaggggaagcgtcctg

SEQ ID NO: 4354 - RNA, 20 nt, synthetic construct
  source 1..20: mol_type = other RNA
gggggagtcggtttacccgc

SEQ ID NO: 4355 - RNA, 20 nt, synthetic construct
  source 1..20: mol_type = other RNA
gggggagttgggtcgcctag

SEQ ID NO: 4356 - RNA, 20 nt, synthetic construct
  source 1..20: mol_type = other RNA
gggggatctctctccctggg

SEQ ID NO: 4357 - RNA, 20 nt, synthetic construct
  source 1..20: mol_type = other RNA
gggggatgggtggctagggg

SEQ ID NO: 4358 - RNA, 20 nt, synthetic construct
  source 1..20: mol_type = other RNA
gggggcaacgcgagagtcgc

SEQ ID NO: 4359 - RNA, 20 nt, synthetic construct
  source 1..20: mol_type = other RNA
gggggcagaaaggcggagcg

SEQ ID NO: 4360 - RNA, 20 nt, synthetic construct
  source 1..20: mol_type = other RNA
gggggcagggccagggaaag

SEQ ID NO: 4361 - RNA, 20 nt, synthetic construct
  source 1..20: mol_type = other RNA
gggggccgcgatctcccctc

SEQ ID NO: 4362 - RNA, 20 nt, synthetic construct
  source 1..20: mol_type = other RNA
gggggccggcactactgtgt

SEQ ID NO: 4363 - RNA, 20 nt, synthetic construct
  source 1..20: mol_type = other RNA
gggggccgtctggtggcttg

SEQ ID NO: 4364 - RNA, 20 nt, synthetic construct
  source 1..20: mol_type = other RNA
gggggcgggctgccggccga

SEQ ID NO: 4365 - RNA, 20 nt, synthetic construct
  source 1..20: mol_type = other RNA
ggggggatgggtggctaggg

SEQ ID NO: 4366 - RNA, 20 nt, synthetic construct
  source 1..20: mol_type = other RNA
ggggggcagaaaggcggagc

SEQ ID NO: 4367 - RNA, 20 nt, synthetic construct
  source 1..20: mol_type = other RNA
ggggggcagggccagggaaa

SEQ ID NO: 4368 - RNA, 20 nt, synthetic construct
  source 1..20: mol_type = other RNA
ggggggccggcactactgtg

SEQ ID NO: 4369 - RNA, 20 nt, synthetic construct
  source 1..20: mol_type = other RNA
ggggggccgtctggtggctt

SEQ ID NO: 4370 - RNA, 20 nt, synthetic construct
  source 1..20: mol_type = other RNA
ggggggtgagaagtggcagc

SEQ ID NO: 4371 - RNA, 20 nt, synthetic construct
  source 1..20: mol_type = other RNA
gggggtagggagtgggggat

SEQ ID NO: 4372 - RNA, 20 nt, synthetic construct
  source 1..20: mol_type = other RNA
gggggtgaagaggcgttggg

SEQ ID NO: 4373 - RNA, 20 nt, synthetic construct
  source 1..20: mol_type = other RNA
gggggtgagaagtggcagca

SEQ ID NO: 4374 - RNA, 20 nt, synthetic construct
  source 1..20: mol_type = other RNA
gggggtggcgaaggtaatgc

SEQ ID NO: 4375 - RNA, 20 nt, synthetic construct
  source 1..20: mol_type = other RNA
gggggtggcggggaggcggg

SEQ ID NO: 4376 - RNA, 20 nt, synthetic construct
  source 1..20: mol_type = other RNA
gggggtggggggcagaaagg

SEQ ID NO: 4377 - RNA, 20 nt, synthetic construct
  source 1..20: mol_type = other RNA
gggggttgcctttcccgtgg

SEQ ID NO: 4378 - RNA, 20 nt, synthetic construct
  source 1..20: mol_type = other RNA
ggggtagggagtgggggatc

SEQ ID NO: 4379 - RNA, 20 nt, synthetic construct
  source 1..20: mol_type = other RNA
ggggtgaagaggcgttgggg

SEQ ID NO: 4380 - RNA, 20 nt, synthetic construct
  source 1..20: mol_type = other RNA
ggggtgagaagtggcagcat

SEQ ID NO: 4381 - RNA, 20 nt, synthetic construct
  source 1..20: mol_type = other RNA
ggggtggcgaaggtaatgcc

SEQ ID NO: 4382 - RNA, 20 nt, synthetic construct
  source 1..20: mol_type = other RNA
ggggtggcggggaggcgggc

SEQ ID NO: 4383 - RNA, 20 nt, synthetic construct
  source 1..20: mol_type = other RNA
ggggtggctggatgcaggcg

SEQ ID NO: 4384 - RNA, 20 nt, synthetic construct
  source 1..20: mol_type = other RNA
ggggtggggggcagaaaggc

SEQ ID NO: 4385 - RNA, 20 nt, synthetic construct
  source 1..20: mol_type = other RNA
ggggtgtagagatgctgggt

SEQ ID NO: 4386 - RNA, 20 nt, synthetic construct
  source 1..20: mol_type = other RNA
ggggtgttgcaacggtgtgt

SEQ ID NO: 4387 - RNA, 20 nt, synthetic construct
  source 1..20: mol_type = other RNA
ggggttgcctttcccgtggg

SEQ ID NO: 4388 - RNA, 20 nt, synthetic construct
  source 1..20: mol_type = other RNA
gggtaaaccgactcccccga

SEQ ID NO: 4389 - RNA, 20 nt, synthetic construct
  source 1..20: mol_type = other RNA
gggtacgggccattcccggc

SEQ ID NO: 4390 - RNA, 20 nt, synthetic construct
  source 1..20: mol_type = other RNA
gggtagggagtgggggatcg

SEQ ID NO: 4391 - RNA, 20 nt, synthetic construct
  source 1..20: mol_type = other RNA
gggtaggtaggtggggtgta

SEQ ID NO: 4392 - RNA, 20 nt, synthetic construct
  source 1..20: mol_type = other RNA
gggtcacctcctccgtctcc

SEQ ID NO: 4393 - RNA, 20 nt, synthetic construct
  source 1..20: mol_type = other RNA
gggtcaggacgcttcccctc

SEQ ID NO: 4394 - RNA, 20 nt, synthetic construct
  source 1..20: mol_type = other RNA
gggtcagtgaaatcggctct

SEQ ID NO: 4395 - RNA, 20 nt, synthetic construct
  source 1..20: mol_type = other RNA
gggtccgacagaaaagagac

SEQ ID NO: 4396 - RNA, 20 nt, synthetic construct
  source 1..20: mol_type = other RNA
gggtcgcctagattagaggg

SEQ ID NO: 4397 - RNA, 20 nt, synthetic construct
  source 1..20: mol_type = other RNA
gggtcgtgggcctggccctc

SEQ ID NO: 4398 - RNA, 20 nt, synthetic construct
  source 1..20: mol_type = other RNA
gggtgaagaggcgttggggg

SEQ ID NO: 4399 - RNA, 20 nt, synthetic construct
  source 1..20: mol_type = other RNA
gggtgagaagtggcagcatc

SEQ ID NO: 4400 - RNA, 20 nt, synthetic construct
  source 1..20: mol_type = other RNA
gggtgcccctggcgccggcg

SEQ ID NO: 4401 - RNA, 20 nt, synthetic construct
  source 1..20: mol_type = other RNA
gggtggcgaaggtaatgcct

SEQ ID NO: 4402 - RNA, 20 nt, synthetic construct
  source 1..20: mol_type = other RNA
gggtggcggggaggcgggcg

SEQ ID NO: 4403 - RNA, 20 nt, synthetic construct
  source 1..20: mol_type = other RNA
gggtggctaggggggccgtc

SEQ ID NO: 4404 - RNA, 20 nt, synthetic construct
  source 1..20: mol_type = other RNA
gggtggctggatgcaggcgg

SEQ ID NO: 4405 - RNA, 20 nt, synthetic construct
  source 1..20: mol_type = other RNA
gggtggggcgggtaggtagg

SEQ ID NO: 4406 - RNA, 20 nt, synthetic construct
  source 1..20: mol_type = other RNA
gggtggggggcagaaaggcg

SEQ ID NO: 4407 - RNA, 20 nt, synthetic construct
  source 1..20: mol_type = other RNA
gggtgtagagatgctgggtg

SEQ ID NO: 4408 - RNA, 20 nt, synthetic construct
  source 1..20: mol_type = other RNA
gggtgttgcaacggtgtgtg

SEQ ID NO: 4409 - RNA, 20 nt, synthetic construct
  source 1..20: mol_type = other RNA
gggttcccaccgcctgaagg

SEQ ID NO: 4410 - RNA, 20 nt, synthetic construct
  source 1..20: mol_type = other RNA
gggttcgagcctggagttga

SEQ ID NO: 4411 - RNA, 20 nt, synthetic construct
  source 1..20: mol_type = other RNA
gggttgcctttcccgtggga

SEQ ID NO: 4412 - RNA, 20 nt, synthetic construct
  source 1..20: mol_type = other RNA
ggtaaaccgactcccccgaa

SEQ ID NO: 4413 - RNA, 20 nt, synthetic construct
  source 1..20: mol_type = other RNA
ggtaaacgtggagtaggcag

SEQ ID NO: 4414 - RNA, 20 nt, synthetic construct
  source 1..20: mol_type = other RNA
ggtaaatcgcatgagaggga

SEQ ID NO: 4415 - RNA, 20 nt, synthetic construct
  source 1..20: mol_type = other RNA
ggtaagggtccgacagaaaa

SEQ ID NO: 4416 - RNA, 20 nt, synthetic construct
  source 1..20: mol_type = other RNA
ggtaatgcctttgggaagca

SEQ ID NO: 4417 - RNA, 20 nt, synthetic construct
  source 1..20: mol_type = other RNA
ggtacactggggggatgggt

SEQ ID NO: 4418 - RNA, 20 nt, synthetic construct
  source 1..20: mol_type = other RNA
ggtacgggccattcccggcc

SEQ ID NO: 4419 - RNA, 20 nt, synthetic construct
  source 1..20: mol_type = other RNA
ggtacggtcctccccgaggc

SEQ ID NO: 4420 - RNA, 20 nt, synthetic construct
  source 1..20: mol_type = other RNA
ggtagggagtgggggatcgg

SEQ ID NO: 4421 - RNA, 20 nt, synthetic construct
  source 1..20: mol_type = other RNA
ggtaggggagcggaactctg

SEQ ID NO: 4422 - RNA, 20 nt, synthetic construct
  source 1..20: mol_type = other RNA
ggtaggtaggtggggtgtag

SEQ ID NO: 4423 - RNA, 20 nt, synthetic construct
  source 1..20: mol_type = other RNA
ggtaggtggggtgtagagat

SEQ ID NO: 4424 - RNA, 20 nt, synthetic construct
  source 1..20: mol_type = other RNA
ggtcacctcctccgtctccc

SEQ ID NO: 4425 - RNA, 20 nt, synthetic construct
  source 1..20: mol_type = other RNA
ggtcaggacgcttcccctcc

SEQ ID NO: 4426 - RNA, 20 nt, synthetic construct
  source 1..20: mol_type = other RNA
ggtcagtgaaatcggctctg

SEQ ID NO: 4427 - RNA, 20 nt, synthetic construct
  source 1..20: mol_type = other RNA
ggtcagtggcgtttccgctc

SEQ ID NO: 4428 - RNA, 20 nt, synthetic construct
  source 1..20: mol_type = other RNA
ggtcccacagcttcgacagc

SEQ ID NO: 4429 - RNA, 20 nt, synthetic construct
  source 1..20: mol_type = other RNA
ggtccgacagaaaagagacc

SEQ ID NO: 4430 - RNA, 20 nt, synthetic construct
  source 1..20: mol_type = other RNA
ggtcctccccgaggccgagc

SEQ ID NO: 4431 - RNA, 20 nt, synthetic construct
  source 1..20: mol_type = other RNA
ggtcgcctagattagagggg

SEQ ID NO: 4432 - RNA, 20 nt, synthetic construct
  source 1..20: mol_type = other RNA
ggtcgggcttgtctcgccct

SEQ ID NO: 4433 - RNA, 20 nt, synthetic construct
  source 1..20: mol_type = other RNA
ggtcgtgggcctggccctcc

SEQ ID NO: 4434 - RNA, 20 nt, synthetic construct
  source 1..20: mol_type = other RNA
ggtctcttttctgtcggacc

SEQ ID NO: 4435 - RNA, 20 nt, synthetic construct
  source 1..20: mol_type = other RNA
ggtctttctcttggatatgg

SEQ ID NO: 4436 - RNA, 20 nt, synthetic construct
  source 1..20: mol_type = other RNA
ggtgaagaggcgttggggga

SEQ ID NO: 4437 - RNA, 20 nt, synthetic construct
  source 1..20: mol_type = other RNA
ggtgacccttccctcccctg

SEQ ID NO: 4438 - RNA, 20 nt, synthetic construct
  source 1..20: mol_type = other RNA
ggtgagaagtggcagcatcc

SEQ ID NO: 4439 - RNA, 20 nt, synthetic construct
  source 1..20: mol_type = other RNA
ggtgcccctggcgccggcgc

SEQ ID NO: 4440 - RNA, 20 nt, synthetic construct
  source 1..20: mol_type = other RNA
ggtgcggggcggtgggcgga

SEQ ID NO: 4441 - RNA, 20 nt, synthetic construct
  source 1..20: mol_type = other RNA
ggtgcggtacactgggggga

SEQ ID NO: 4442 - RNA, 20 nt, synthetic construct
  source 1..20: mol_type = other RNA
ggtggcgaaggtaatgcctt

SEQ ID NO: 4443 - RNA, 20 nt, synthetic construct
  source 1..20: mol_type = other RNA
ggtggcggggaggcgggcgt

SEQ ID NO: 4444 - RNA, 20 nt, synthetic construct
  source 1..20: mol_type = other RNA
ggtggctaggggggccgtct

SEQ ID NO: 4445 - RNA, 20 nt, synthetic construct
  source 1..20: mol_type = other RNA
ggtggctggatgcaggcggg

SEQ ID NO: 4446 - RNA, 20 nt, synthetic construct
  source 1..20: mol_type = other RNA
ggtggcttgcgggggttgcc

SEQ ID NO: 4447 - RNA, 20 nt, synthetic construct
  source 1..20: mol_type = other RNA
ggtgggaagccagaaaacga

SEQ ID NO: 4448 - RNA, 20 nt, synthetic construct
  source 1..20: mol_type = other RNA
ggtgggaggacgcccgcgcc

SEQ ID NO: 4449 - RNA, 20 nt, synthetic construct
  source 1..20: mol_type = other RNA
ggtgggaggggaggtgcggt

SEQ ID NO: 4450 - RNA, 20 nt, synthetic construct
  source 1..20: mol_type = other RNA
ggtgggcggagaggccaatg

SEQ ID NO: 4451 - RNA, 20 nt, synthetic construct
  source 1..20: mol_type = other RNA
ggtggggcgggtaggtaggt

SEQ ID NO: 4452 - RNA, 20 nt, synthetic construct
  source 1..20: mol_type = other RNA
ggtggggggcagaaaggcgg

SEQ ID NO: 4453 - RNA, 20 nt, synthetic construct
  source 1..20: mol_type = other RNA
ggtgggggtggcgaaggtaa

SEQ ID NO: 4454 - RNA, 20 nt, synthetic construct
  source 1..20: mol_type = other RNA
ggtgggggtggggggcagaa

SEQ ID NO: 4455 - RNA, 20 nt, synthetic construct
  source 1..20: mol_type = other RNA
ggtggggtgtagagatgctg

SEQ ID NO: 4456 - RNA, 20 nt, synthetic construct
  source 1..20: mol_type = other RNA
ggtgtagagatgctgggtgt

SEQ ID NO: 4457 - RNA, 20 nt, synthetic construct
  source 1..20: mol_type = other RNA
ggtgtcgaagacaagcaggc

SEQ ID NO: 4458 - RNA, 20 nt, synthetic construct
  source 1..20: mol_type = other RNA
ggtgtgtgcaaggcggcgag

SEQ ID NO: 4459 - RNA, 20 nt, synthetic construct
  source 1..20: mol_type = other RNA
ggtgttgcaacggtgtgtgc

SEQ ID NO: 4460 - RNA, 20 nt, synthetic construct
  source 1..20: mol_type = other RNA
ggttcaagtaggtaaatcgc

SEQ ID NO: 4461 - RNA, 20 nt, synthetic construct
  source 1..20: mol_type = other RNA
ggttcccaccgcctgaaggg

SEQ ID NO: 4462 - RNA, 20 nt, synthetic construct
  source 1..20: mol_type = other RNA
ggttcgagcctggagttgag

SEQ ID NO: 4463 - RNA, 20 nt, synthetic construct
  source 1..20: mol_type = other RNA
ggttcggtctcttttctgtc

SEQ ID NO: 4464 - RNA, 20 nt, synthetic construct
  source 1..20: mol_type = other RNA
ggttgcctttcccgtgggaa

SEQ ID NO: 4465 - RNA, 20 nt, synthetic construct
  source 1..20: mol_type = other RNA
ggttggagtaaagctcctgt

SEQ ID NO: 4466 - RNA, 20 nt, synthetic construct
  source 1..20: mol_type = other RNA
ggtttacccgccgcctgctt

SEQ ID NO: 4467 - RNA, 20 nt, synthetic construct
  source 1..20: mol_type = other RNA
ggtttcgagcattttccgct

SEQ ID NO: 4468 - RNA, 20 nt, synthetic construct
  source 1..20: mol_type = other RNA
ggtttcgctcatgtgagact

SEQ ID NO: 4469 - RNA, 20 nt, synthetic construct
  source 1..20: mol_type = other RNA
gtaaaacgacacaatctggc

SEQ ID NO: 4470 - RNA, 20 nt, synthetic construct
  source 1..20: mol_type = other RNA
gtaaaccgactcccccgaag

SEQ ID NO: 4471 - RNA, 20 nt, synthetic construct
  source 1..20: mol_type = other RNA
gtaaacgtggagtaggcagt

SEQ ID NO: 4472 - RNA, 20 nt, synthetic construct
  source 1..20: mol_type = other RNA
gtaaagctcctgtcagttac

SEQ ID NO: 4473 - RNA, 20 nt, synthetic construct
  source 1..20: mol_type = other RNA
gtaaatcgcatgagagggaa

SEQ ID NO: 4474 - RNA, 20 nt, synthetic construct
  source 1..20: mol_type = other RNA
gtaacaaacattatgttccc

SEQ ID NO: 4475 - RNA, 20 nt, synthetic construct
  source 1..20: mol_type = other RNA
gtaactgacaggagctttac

SEQ ID NO: 4476 - RNA, 20 nt, synthetic construct
  source 1..20: mol_type = other RNA
gtaagggtccgacagaaaag

SEQ ID NO: 4477 - RNA, 20 nt, synthetic construct
  source 1..20: mol_type = other RNA
gtaagtcgggaatgtgaaga

SEQ ID NO: 4478 - RNA, 20 nt, synthetic construct
  source 1..20: mol_type = other RNA
gtaatcttcctggacgcctt

SEQ ID NO: 4479 - RNA, 20 nt, synthetic construct
  source 1..20: mol_type = other RNA
gtaatgcctttgggaagcag

SEQ ID NO: 4480 - RNA, 20 nt, synthetic construct
  source 1..20: mol_type = other RNA
gtacactggggggatgggtg

SEQ ID NO: 4481 - RNA, 20 nt, synthetic construct
  source 1..20: mol_type = other RNA
gtaccaacgcccgcctcccc

SEQ ID NO: 4482 - RNA, 20 nt, synthetic construct
  source 1..20: mol_type = other RNA
gtacccgtgaggtgggggtg

SEQ ID NO: 4483 - RNA, 20 nt, synthetic construct
  source 1..20: mol_type = other RNA
gtaccgcacctcccctccca

SEQ ID NO: 4484 - RNA, 20 nt, synthetic construct
  source 1..20: mol_type = other RNA
gtacgcagccgcttagcgac

SEQ ID NO: 4485 - RNA, 20 nt, synthetic construct
  source 1..20: mol_type = other RNA
gtacgggccattcccggcca

SEQ ID NO: 4486 - RNA, 20 nt, synthetic construct
  source 1..20: mol_type = other RNA
gtacggtcctccccgaggcc

SEQ ID NO: 4487 - RNA, 20 nt, synthetic construct
  source 1..20: mol_type = other RNA
gtactcccgacggcgtaact

SEQ ID NO: 4488 - RNA, 20 nt, synthetic construct
  source 1..20: mol_type = other RNA
gtagagatgctgggtgtgcg

SEQ ID NO: 4489 - RNA, 20 nt, synthetic construct
  source 1..20: mol_type = other RNA
gtagcaagggcccggtccca

SEQ ID NO: 4490 - RNA, 20 nt, synthetic construct
  source 1..20: mol_type = other RNA
gtagcaggtcgggcttgtct

SEQ ID NO: 4491 - RNA, 20 nt, synthetic construct
  source 1..20: mol_type = other RNA
gtaggaaagagccctggttc

SEQ ID NO: 4492 - RNA, 20 nt, synthetic construct
  source 1..20: mol_type = other RNA
gtaggcagttcccaggaaag

SEQ ID NO: 4493 - RNA, 20 nt, synthetic construct
  source 1..20: mol_type = other RNA
gtagggagtgggggatcggg

SEQ ID NO: 4494 - RNA, 20 nt, synthetic construct
  source 1..20: mol_type = other RNA
gtaggggagcggaactctgg

SEQ ID NO: 4495 - RNA, 20 nt, synthetic construct
  source 1..20: mol_type = other RNA
gtagggttcgagcctggagt

SEQ ID NO: 4496 - RNA, 20 nt, synthetic construct
  source 1..20: mol_type = other RNA
gtaggtaaatcgcatgagag

SEQ ID NO: 4497 - RNA, 20 nt, synthetic construct
  source 1..20: mol_type = other RNA
gtaggtaggtggggtgtaga

SEQ ID NO: 4498 - RNA, 20 nt, synthetic construct
  source 1..20: mol_type = other RNA
gtaggtggggtgtagagatg

SEQ ID NO: 4499 - RNA, 20 nt, synthetic construct
  source 1..20: mol_type = other RNA
gtagtgccggcccccctctt

SEQ ID NO: 4500 - RNA, 20 nt, synthetic construct
  source 1..20: mol_type = other RNA
gtatgcctgtgtatttcgag

SEQ ID NO: 4501 - RNA, 20 nt, synthetic construct
  source 1..20: mol_type = other RNA
gtattctggttggagtaaag

SEQ ID NO: 4502 - RNA, 20 nt, synthetic construct
  source 1..20: mol_type = other RNA
gtatttcgagcggagggcag

SEQ ID NO: 4503 - RNA, 20 nt, synthetic construct
  source 1..20: mol_type = other RNA
gtcacaaggccgcgagaacg

SEQ ID NO: 4504 - RNA, 20 nt, synthetic construct
  source 1..20: mol_type = other RNA
gtcacctcctccgtctcccc

SEQ ID NO: 4505 - RNA, 20 nt, synthetic construct
  source 1..20: mol_type = other RNA
gtcaggacgcttcccctccc

SEQ ID NO: 4506 - RNA, 20 nt, synthetic construct
  source 1..20: mol_type = other RNA
gtcagtgaaatcggctctgg

SEQ ID NO: 4507 - RNA, 20 nt, synthetic construct
  source 1..20: mol_type = other RNA
gtcagtggcgtttccgctcg

SEQ ID NO: 4508 - RNA, 20 nt, synthetic construct
  source 1..20: mol_type = other RNA
gtcagtggtctttctcttgg

SEQ ID NO: 4509 - RNA, 20 nt, synthetic construct
  source 1..20: mol_type = other RNA
gtcagttacgccgtcgggag

SEQ ID NO: 4510 - RNA, 20 nt, synthetic construct
  source 1..20: mol_type = other RNA
gtccaggaagattacggagg

SEQ ID NO: 4511 - RNA, 20 nt, synthetic construct
  source 1..20: mol_type = other RNA
gtcccacagcttcgacagcc

SEQ ID NO: 4512 - RNA, 20 nt, synthetic construct
  source 1..20: mol_type = other RNA
gtcccgccagtccgccaaca

SEQ ID NO: 4513 - RNA, 20 nt, synthetic construct
  source 1..20: mol_type = other RNA
gtccgacagaaaagagaccg

SEQ ID NO: 4514 - RNA, 20 nt, synthetic construct
  source 1..20: mol_type = other RNA
gtccgccaacacagtagtgc

SEQ ID NO: 4515 - RNA, 20 nt, synthetic construct
  source 1..20: mol_type = other RNA
gtccggtttcgagcattttc

SEQ ID NO: 4516 - RNA, 20 nt, synthetic construct
  source 1..20: mol_type = other RNA
gtcctcccaccctccccttc

SEQ ID NO: 4517 - RNA, 20 nt, synthetic construct
  source 1..20: mol_type = other RNA
gtcctccccgaggccgagcg

SEQ ID NO: 4518 - RNA, 20 nt, synthetic construct
  source 1..20: mol_type = other RNA
gtcctgacccaggaaaaaca

SEQ ID NO: 4519 - RNA, 20 nt, synthetic construct
  source 1..20: mol_type = other RNA
gtcctgccgcctcccgggag

SEQ ID NO: 4520 - RNA, 20 nt, synthetic construct
  source 1..20: mol_type = other RNA
gtccttgcttgtctcacttc

SEQ ID NO: 4521 - RNA, 20 nt, synthetic construct
  source 1..20: mol_type = other RNA
gtcgaagacaagcaggcggc

SEQ ID NO: 4522 - RNA, 20 nt, synthetic construct
  source 1..20: mol_type = other RNA
gtcgaagctgtgggaccggg

SEQ ID NO: 4523 - RNA, 20 nt, synthetic construct
  source 1..20: mol_type = other RNA
gtcgccgattggccgtttct

SEQ ID NO: 4524 - RNA, 20 nt, synthetic construct
  source 1..20: mol_type = other RNA
gtcgcctagattagaggggg

SEQ ID NO: 4525 - RNA, 20 nt, synthetic construct
  source 1..20: mol_type = other RNA
gtcgctaagcggctgcgtac

SEQ ID NO: 4526 - RNA, 20 nt, synthetic construct
  source 1..20: mol_type = other RNA
gtcggacccttaccttgtcc

SEQ ID NO: 4527 - RNA, 20 nt, synthetic construct
  source 1..20: mol_type = other RNA
gtcgggaacataatgtttgt

SEQ ID NO: 4528 - RNA, 20 nt, synthetic construct
  source 1..20: mol_type = other RNA
gtcgggaatgtgaagaggag

SEQ ID NO: 4529 - RNA, 20 nt, synthetic construct
  source 1..20: mol_type = other RNA
gtcgggagtacgcagccgct

SEQ ID NO: 4530 - RNA, 20 nt, synthetic construct
  source 1..20: mol_type = other RNA
gtcgggcttgtctcgccctt

SEQ ID NO: 4531 - RNA, 20 nt, synthetic construct
  source 1..20: mol_type = other RNA
gtcggtttacccgccgcctg

SEQ ID NO: 4532 - RNA, 20 nt, synthetic construct
  source 1..20: mol_type = other RNA
gtcgtgggcctggccctccc

SEQ ID NO: 4533 - RNA, 20 nt, synthetic construct
  source 1..20: mol_type = other RNA
gtcgttttacttgccttggg

SEQ ID NO: 4534 - RNA, 20 nt, synthetic construct
  source 1..20: mol_type = other RNA
gtctcacatgagcgaaacca

SEQ ID NO: 4535 - RNA, 20 nt, synthetic construct
  source 1..20: mol_type = other RNA
gtctcacttcttgggcgtca

SEQ ID NO: 4536 - RNA, 20 nt, synthetic construct
  source 1..20: mol_type = other RNA
gtctccccgcgctcgctctc

SEQ ID NO: 4537 - RNA, 20 nt, synthetic construct
  source 1..20: mol_type = other RNA
gtctcgcccttcaggcggtg

SEQ ID NO: 4538 - RNA, 20 nt, synthetic construct
  source 1..20: mol_type = other RNA
gtctcttttctgtcggaccc

SEQ ID NO: 4539 - RNA, 20 nt, synthetic construct
  source 1..20: mol_type = other RNA
gtctgagatagcctcgttga

SEQ ID NO: 4540 - RNA, 20 nt, synthetic construct
  source 1..20: mol_type = other RNA
gtctggccccgcgcccctgc

SEQ ID NO: 4541 - RNA, 20 nt, synthetic construct
  source 1..20: mol_type = other RNA
gtctggtggcttgcgggggt

SEQ ID NO: 4542 - RNA, 20 nt, synthetic construct
  source 1..20: mol_type = other RNA
gtctgtcacaaggccgcgag

SEQ ID NO: 4543 - RNA, 20 nt, synthetic construct
  source 1..20: mol_type = other RNA
gtcttcgacacctgattggc

SEQ ID NO: 4544 - RNA, 20 nt, synthetic construct
  source 1..20: mol_type = other RNA
gtctttctcttggatatgga

SEQ ID NO: 4545 - RNA, 20 nt, synthetic construct
  source 1..20: mol_type = other RNA
gtgaaaacacaaatggcgta

SEQ ID NO: 4546 - RNA, 20 nt, synthetic construct
  source 1..20: mol_type = other RNA
gtgaaatcggctctggcgcg

SEQ ID NO: 4547 - RNA, 20 nt, synthetic construct
  source 1..20: mol_type = other RNA
gtgaagaggagtgtaggaaa

SEQ ID NO: 4548 - RNA, 20 nt, synthetic construct
  source 1..20: mol_type = other RNA
gtgaagaggcgttgggggag

SEQ ID NO: 4549 - RNA, 20 nt, synthetic construct
  source 1..20: mol_type = other RNA
gtgacagacaactctgatcg

SEQ ID NO: 4550 - RNA, 20 nt, synthetic construct
  source 1..20: mol_type = other RNA
gtgacccttccctcccctgg

SEQ ID NO: 4551 - RNA, 20 nt, synthetic construct
  source 1..20: mol_type = other RNA
gtgagaagtggcagcatcct

SEQ ID NO: 4552 - RNA, 20 nt, synthetic construct
  source 1..20: mol_type = other RNA
gtgagaatatcttcaaaggc

SEQ ID NO: 4553 - RNA, 20 nt, synthetic construct
  source 1..20: mol_type = other RNA
gtgagacaagcaaggactct

SEQ ID NO: 4554 - RNA, 20 nt, synthetic construct
  source 1..20: mol_type = other RNA
gtgagactcgagccagtagc

SEQ ID NO: 4555 - RNA, 20 nt, synthetic construct
  source 1..20: mol_type = other RNA
gtgaggtgggggtggggggc

SEQ ID NO: 4556 - RNA, 20 nt, synthetic construct
  source 1..20: mol_type = other RNA
gtgaggttcggtctcttttc

SEQ ID NO: 4557 - RNA, 20 nt, synthetic construct
  source 1..20: mol_type = other RNA
gtgagtctctgagcgcaggc

SEQ ID NO: 4558 - RNA, 20 nt, synthetic construct
  source 1..20: mol_type = other RNA
gtgcaaggcggcgagggggg

SEQ ID NO: 4559 - RNA, 20 nt, synthetic construct
  source 1..20: mol_type = other RNA
gtgccacagcgtgtctgaga

SEQ ID NO: 4560 - RNA, 20 nt, synthetic construct
  source 1..20: mol_type = other RNA
gtgcccctggcgccggcgct

SEQ ID NO: 4561 - RNA, 20 nt, synthetic construct
  source 1..20: mol_type = other RNA
gtgccggcccccctctttcc

SEQ ID NO: 4562 - RNA, 20 nt, synthetic construct
  source 1..20: mol_type = other RNA
gtgcctgtagcaggtcgggc

SEQ ID NO: 4563 - RNA, 20 nt, synthetic construct
  source 1..20: mol_type = other RNA
gtgcggggcggtgggcggag

SEQ ID NO: 4564 - RNA, 20 nt, synthetic construct
  source 1..20: mol_type = other RNA
gtgcggtacactggggggat

SEQ ID NO: 4565 - RNA, 20 nt, synthetic construct
  source 1..20: mol_type = other RNA
gtgcggtcagtggcgtttcc

SEQ ID NO: 4566 - RNA, 20 nt, synthetic construct
  source 1..20: mol_type = other RNA
gtgcttcggcgctccggctc

SEQ ID NO: 4567 - RNA, 20 nt, synthetic construct
  source 1..20: mol_type = other RNA
gtggagaacgatcttgtgag

SEQ ID NO: 4568 - RNA, 20 nt, synthetic construct
  source 1..20: mol_type = other RNA
gtggagtaggcagttcccag

SEQ ID NO: 4569 - RNA, 20 nt, synthetic construct
  source 1..20: mol_type = other RNA
gtggcacacgccacggggag

SEQ ID NO: 4570 - RNA, 20 nt, synthetic construct
  source 1..20: mol_type = other RNA
gtggcagcatcctcctaaga

SEQ ID NO: 4571 - RNA, 20 nt, synthetic construct
  source 1..20: mol_type = other RNA
gtggcaggaagcgcgcgctg

SEQ ID NO: 4572 - RNA, 20 nt, synthetic construct
  source 1..20: mol_type = other RNA
gtggcgaaggtaatgccttt

SEQ ID NO: 4573 - RNA, 20 nt, synthetic construct
  source 1..20: mol_type = other RNA
gtggcgccgcgttgggccta

SEQ ID NO: 4574 - RNA, 20 nt, synthetic construct
  source 1..20: mol_type = other RNA
gtggcggggaggcgggcgtt

SEQ ID NO: 4575 - RNA, 20 nt, synthetic construct
  source 1..20: mol_type = other RNA
gtggcgtgtgccacagcgtg

SEQ ID NO: 4576 - RNA, 20 nt, synthetic construct
  source 1..20: mol_type = other RNA
gtggcgtttccgctcgggca

SEQ ID NO: 4577 - RNA, 20 nt, synthetic construct
  source 1..20: mol_type = other RNA
gtggctaggggggccgtctg

SEQ ID NO: 4578 - RNA, 20 nt, synthetic construct
  source 1..20: mol_type = other RNA
gtggctggatgcaggcggga

SEQ ID NO: 4579 - RNA, 20 nt, synthetic construct
  source 1..20: mol_type = other RNA
gtggcttgcgggggttgcct

SEQ ID NO: 4580 - RNA, 20 nt, synthetic construct
  source 1..20: mol_type = other RNA
gtgggaagccagaaaacgag

SEQ ID NO: 4581 - RNA, 20 nt, synthetic construct
  source 1..20: mol_type = other RNA
gtgggaagtcgggaacataa

SEQ ID NO: 4582 - RNA, 20 nt, synthetic construct
  source 1..20: mol_type = other RNA
gtgggaccgggcccttgcta

SEQ ID NO: 4583 - RNA, 20 nt, synthetic construct
  source 1..20: mol_type = other RNA
gtgggaggacgcccgcgcca

SEQ ID NO: 4584 - RNA, 20 nt, synthetic construct
  source 1..20: mol_type = other RNA
gtgggaggggaggtgcggta

SEQ ID NO: 4585 - RNA, 20 nt, synthetic construct
  source 1..20: mol_type = other RNA
gtgggccaatgggtgcgggg

SEQ ID NO: 4586 - RNA, 20 nt, synthetic construct
  source 1..20: mol_type = other RNA
gtgggcctggccctccccaa

SEQ ID NO: 4587 - RNA, 20 nt, synthetic construct
  source 1..20: mol_type = other RNA
gtgggcggagaggccaatgg

SEQ ID NO: 4588 - RNA, 20 nt, synthetic construct
  source 1..20: mol_type = other RNA
gtggggcgggtaggtaggtg

SEQ ID NO: 4589 - RNA, 20 nt, synthetic construct
  source 1..20: mol_type = other RNA
gtggggggcagaaaggcgga

SEQ ID NO: 4590 - RNA, 20 nt, synthetic construct
  source 1..20: mol_type = other RNA
gtgggggtggcgaaggtaat

SEQ ID NO: 4591 - RNA, 20 nt, synthetic construct
  source 1..20: mol_type = other RNA
gtgggggtggggggcagaaa

SEQ ID NO: 4592 - RNA, 20 nt, synthetic construct
  source 1..20: mol_type = other RNA
gtggggtgtagagatgctgg

SEQ ID NO: 4593 - RNA, 20 nt, synthetic construct
  source 1..20: mol_type = other RNA
gtggtctttctcttggatat

SEQ ID NO: 4594 - RNA, 20 nt, synthetic construct
  source 1..20: mol_type = other RNA
gtggtgggggtggcgaaggt

SEQ ID NO: 4595 - RNA, 20 nt, synthetic construct
  source 1..20: mol_type = other RNA
gtggtttcgctcatgtgaga

SEQ ID NO: 4596 - RNA, 20 nt, synthetic construct
  source 1..20: mol_type = other RNA
gtgtaagtcgggaatgtgaa

SEQ ID NO: 4597 - RNA, 20 nt, synthetic construct
  source 1..20: mol_type = other RNA
gtgtaccgcacctcccctcc

SEQ ID NO: 4598 - RNA, 20 nt, synthetic construct
  source 1..20: mol_type = other RNA
gtgtagagatgctgggtgtg

SEQ ID NO: 4599 - RNA, 20 nt, synthetic construct
  source 1..20: mol_type = other RNA
gtgtaggaaagagccctggt

SEQ ID NO: 4600 - RNA, 20 nt, synthetic construct
  source 1..20: mol_type = other RNA
gtgtagggttcgagcctgga

SEQ ID NO: 4601 - RNA, 20 nt, synthetic construct
  source 1..20: mol_type = other RNA
gtgtatttcgagcggagggc

SEQ ID NO: 4602 - RNA, 20 nt, synthetic construct
  source 1..20: mol_type = other RNA
gtgtcgaagacaagcaggcg

SEQ ID NO: 4603 - RNA, 20 nt, synthetic construct
  source 1..20: mol_type = other RNA
gtgtcgttttacttgccttg

SEQ ID NO: 4604 - RNA, 20 nt, synthetic construct
  source 1..20: mol_type = other RNA
gtgtctgagatagcctcgtt

SEQ ID NO: 4605 - RNA, 20 nt, synthetic construct
  source 1..20: mol_type = other RNA
gtgtctggccccgcgcccct

SEQ ID NO: 4606 - RNA, 20 nt, synthetic construct
  source 1..20: mol_type = other RNA
gtgtgaaaacacaaatggcg

SEQ ID NO: 4607 - RNA, 20 nt, synthetic construct
  source 1..20: mol_type = other RNA
gtgtgcaaggcggcgagggg

SEQ ID NO: 4608 - RNA, 20 nt, synthetic construct
  source 1..20: mol_type = other RNA
gtgtgccacagcgtgtctga

SEQ ID NO: 4609 - RNA, 20 nt, synthetic construct
  source 1..20: mol_type = other RNA
gtgtggtgggggtggcgaag

SEQ ID NO: 4610 - RNA, 20 nt, synthetic construct
  source 1..20: mol_type = other RNA
gtgtgtgaaaacacaaatgg

SEQ ID NO: 4611 - RNA, 20 nt, synthetic construct
  source 1..20: mol_type = other RNA
gtgtgtgcaaggcggcgagg

SEQ ID NO: 4612 - RNA, 20 nt, synthetic construct
  source 1..20: mol_type = other RNA
gtgttgcaacggtgtgtgca

SEQ ID NO: 4613 - RNA, 20 nt, synthetic construct
  source 1..20: mol_type = other RNA
gtgttggcggactggcggga

SEQ ID NO: 4614 - RNA, 20 nt, synthetic construct
  source 1..20: mol_type = other RNA
gtgttttcacacacggcggg

SEQ ID NO: 4615 - RNA, 20 nt, synthetic construct
  source 1..20: mol_type = other RNA
gttaaactgttgggaaagcc

SEQ ID NO: 4616 - RNA, 20 nt, synthetic construct
  source 1..20: mol_type = other RNA
gttacgccgtcgggagtacg

SEQ ID NO: 4617 - RNA, 20 nt, synthetic construct
  source 1..20: mol_type = other RNA
gttacgttgggagggaaagg

SEQ ID NO: 4618 - RNA, 20 nt, synthetic construct
  source 1..20: mol_type = other RNA
gttaggcccaacgcggcgcc

SEQ ID NO: 4619 - RNA, 20 nt, synthetic construct
  source 1..20: mol_type = other RNA
gttcaagtaggtaaatcgca

SEQ ID NO: 4620 - RNA, 20 nt, synthetic construct
  source 1..20: mol_type = other RNA
gttcccaccgcctgaagggc

SEQ ID NO: 4621 - RNA, 20 nt, synthetic construct
  source 1..20: mol_type = other RNA
gttcccaggaaagggggtga

SEQ ID NO: 4622 - RNA, 20 nt, synthetic construct
  source 1..20: mol_type = other RNA
gttcccgacttcccacggga

SEQ ID NO: 4623 - RNA, 20 nt, synthetic construct
  source 1..20: mol_type = other RNA
gttccgctcccctacctagc

SEQ ID NO: 4624 - RNA, 20 nt, synthetic construct
  source 1..20: mol_type = other RNA
gttcgagcctggagttgagc

SEQ ID NO: 4625 - RNA, 20 nt, synthetic construct
  source 1..20: mol_type = other RNA
gttcggtctcttttctgtcg

SEQ ID NO: 4626 - RNA, 20 nt, synthetic construct
  source 1..20: mol_type = other RNA
gttctccacgcccaaggcaa

SEQ ID NO: 4627 - RNA, 20 nt, synthetic construct
  source 1..20: mol_type = other RNA
gttctcgcggccttgtgaca

SEQ ID NO: 4628 - RNA, 20 nt, synthetic construct
  source 1..20: mol_type = other RNA
gttctctggctccccgtggc

SEQ ID NO: 4629 - RNA, 20 nt, synthetic construct
  source 1..20: mol_type = other RNA
gttgaatgtgtagggttcga

SEQ ID NO: 4630 - RNA, 20 nt, synthetic construct
  source 1..20: mol_type = other RNA
gttgagccagattgtgtcgt

SEQ ID NO: 4631 - RNA, 20 nt, synthetic construct
  source 1..20: mol_type = other RNA
gttgcaacaccccattttcc

SEQ ID NO: 4632 - RNA, 20 nt, synthetic construct
  source 1..20: mol_type = other RNA
gttgcaacggtgtgtgcaag

SEQ ID NO: 4633 - RNA, 20 nt, synthetic construct
  source 1..20: mol_type = other RNA
gttgccccctgggtggggcg

SEQ ID NO: 4634 - RNA, 20 nt, synthetic construct
  source 1..20: mol_type = other RNA
gttgcctttcccgtgggaag

SEQ ID NO: 4635 - RNA, 20 nt, synthetic construct
  source 1..20: mol_type = other RNA
gttgcgcaggggcgcggggc

SEQ ID NO: 4636 - RNA, 20 nt, synthetic construct
  source 1..20: mol_type = other RNA
gttggagtaaagctcctgtc

SEQ ID NO: 4637 - RNA, 20 nt, synthetic construct
  source 1..20: mol_type = other RNA
gttggcggactggcgggact

SEQ ID NO: 4638 - RNA, 20 nt, synthetic construct
  source 1..20: mol_type = other RNA
gttgggaaagccccttctat

SEQ ID NO: 4639 - RNA, 20 nt, synthetic construct
  source 1..20: mol_type = other RNA
gttgggagggaaaggggtgg

SEQ ID NO: 4640 - RNA, 20 nt, synthetic construct
  source 1..20: mol_type = other RNA
gttgggcctaactcgagtcc

SEQ ID NO: 4641 - RNA, 20 nt, synthetic construct
  source 1..20: mol_type = other RNA
gttgggggaggggaagcgtc

SEQ ID NO: 4642 - RNA, 20 nt, synthetic construct
  source 1..20: mol_type = other RNA
gttgggtcgcctagattaga

SEQ ID NO: 4643 - RNA, 20 nt, synthetic construct
  source 1..20: mol_type = other RNA
gttggtacggtcctccccga

SEQ ID NO: 4644 - RNA, 20 nt, synthetic construct
  source 1..20: mol_type = other RNA
gttgtctgtcacaaggccgc

SEQ ID NO: 4645 - RNA, 20 nt, synthetic construct
  source 1..20: mol_type = other RNA
gtttaactttccctctcatg

SEQ ID NO: 4646 - RNA, 20 nt, synthetic construct
  source 1..20: mol_type = other RNA
gtttacccgccgcctgcttg

SEQ ID NO: 4647 - RNA, 20 nt, synthetic construct
  source 1..20: mol_type = other RNA
gtttacctttcccttgagga

SEQ ID NO: 4648 - RNA, 20 nt, synthetic construct
  source 1..20: mol_type = other RNA
gtttccgctcgggcagcggg

SEQ ID NO: 4649 - RNA, 20 nt, synthetic construct
  source 1..20: mol_type = other RNA
gtttcctggccgggaatggc

SEQ ID NO: 4650 - RNA, 20 nt, synthetic construct
  source 1..20: mol_type = other RNA
gtttcgagcattttccgctc

SEQ ID NO: 4651 - RNA, 20 nt, synthetic construct
  source 1..20: mol_type = other RNA
gtttcgctcatgtgagactc

SEQ ID NO: 4652 - RNA, 20 nt, synthetic construct
  source 1..20: mol_type = other RNA
gtttctcctcccgccgtgtg

SEQ ID NO: 4653 - RNA, 20 nt, synthetic construct
  source 1..20: mol_type = other RNA
gtttgttacgttgggaggga

SEQ ID NO: 4654 - RNA, 20 nt, synthetic construct
  source 1..20: mol_type = other RNA
gttttacttgccttgggcgt

SEQ ID NO: 4655 - RNA, 20 nt, synthetic construct
  source 1..20: mol_type = other RNA
gttttcacacacggcgggag

SEQ ID NO: 4656 - RNA, 20 nt, synthetic construct
  source 1..20: mol_type = other RNA
gttttctggcttcccacctc

SEQ ID NO: 4657 - RNA, 20 nt, synthetic construct
  source 1..20: mol_type = other RNA
gtttttcctgggtcaggacg

SEQ ID NO: 4658 - RNA, 20 nt, synthetic construct
  source 1..20: mol_type = other RNA
taaaacgacacaatctggct

SEQ ID NO: 4659 - RNA, 20 nt, synthetic construct
  source 1..20: mol_type = other RNA
taaaccgactcccccgaagg

SEQ ID NO: 4660 - RNA, 20 nt, synthetic construct
  source 1..20: mol_type = other RNA
taaacgtggagtaggcagtt

SEQ ID NO: 4661 - RNA, 20 nt, synthetic construct
  source 1..20: mol_type = other RNA
taaactgttgggaaagcccc

SEQ ID NO: 4662 - RNA, 20 nt, synthetic construct
  source 1..20: mol_type = other RNA
taaagctcctgtcagttacg

SEQ ID NO: 4663 - RNA, 20 nt, synthetic construct
  source 1..20: mol_type = other RNA
taaagggaatatttttctgc

SEQ ID NO: 4664 - RNA, 20 nt, synthetic construct
  source 1..20: mol_type = other RNA
taaatcgcatgagagggaaa

SEQ ID NO: 4665 - RNA, 20 nt, synthetic construct
  source 1..20: mol_type = other RNA
taacaaacattatgttcccg

SEQ ID NO: 4666 - RNA, 20 nt, synthetic construct
  source 1..20: mol_type = other RNA
taactcgagtcctgccgcct

SEQ ID NO: 4667 - RNA, 20 nt, synthetic construct
  source 1..20: mol_type = other RNA
taactgacaggagctttact

SEQ ID NO: 4668 - RNA, 20 nt, synthetic construct
  source 1..20: mol_type = other RNA
taactttccctctcatgcga

SEQ ID NO: 4669 - RNA, 20 nt, synthetic construct
  source 1..20: mol_type = other RNA
taagagcttggggagggcca

SEQ ID NO: 4670 - RNA, 20 nt, synthetic construct
  source 1..20: mol_type = other RNA
taagcggctgcgtactcccg

SEQ ID NO: 4671 - RNA, 20 nt, synthetic construct
  source 1..20: mol_type = other RNA
taagggtccgacagaaaaga

SEQ ID NO: 4672 - RNA, 20 nt, synthetic construct
  source 1..20: mol_type = other RNA
taagtcgggaatgtgaagag

SEQ ID NO: 4673 - RNA, 20 nt, synthetic construct
  source 1..20: mol_type = other RNA
taatctaggcgacccaactc

SEQ ID NO: 4674 - RNA, 20 nt, synthetic construct
  source 1..20: mol_type = other RNA
taatcttcctggacgccttc

SEQ ID NO: 4675 - RNA, 20 nt, synthetic construct
  source 1..20: mol_type = other RNA
taatgcctttgggaagcagc

SEQ ID NO: 4676 - RNA, 20 nt, synthetic construct
  source 1..20: mol_type = other RNA
taatgtttgttacgttggga

SEQ ID NO: 4677 - RNA, 20 nt, synthetic construct
  source 1..20: mol_type = other RNA
taattgattctatagagtcc

SEQ ID NO: 4678 - RNA, 20 nt, synthetic construct
  source 1..20: mol_type = other RNA
tacacattcaacgaggctat

SEQ ID NO: 4679 - RNA, 20 nt, synthetic construct
  source 1..20: mol_type = other RNA
tacaccccacctacctaccc

SEQ ID NO: 4680 - RNA, 20 nt, synthetic construct
  source 1..20: mol_type = other RNA
tacacgcagagggaaagaga

SEQ ID NO: 4681 - RNA, 20 nt, synthetic construct
  source 1..20: mol_type = other RNA
tacactcctcttcacattcc

SEQ ID NO: 4682 - RNA, 20 nt, synthetic construct
  source 1..20: mol_type = other RNA
tacactggggggatgggtgg

SEQ ID NO: 4683 - RNA, 20 nt, synthetic construct
  source 1..20: mol_type = other RNA
tacaggcactcgtgggggtg

SEQ ID NO: 4684 - RNA, 20 nt, synthetic construct
  source 1..20: mol_type = other RNA
taccaacgcccgcctccccg

SEQ ID NO: 4685 - RNA, 20 nt, synthetic construct
  source 1..20: mol_type = other RNA
tacccccgttctcgcggcct

SEQ ID NO: 4686 - RNA, 20 nt, synthetic construct
  source 1..20: mol_type = other RNA
tacccgccccacccaggggg

SEQ ID NO: 4687 - RNA, 20 nt, synthetic construct
  source 1..20: mol_type = other RNA
tacccgccgcctgcttgtct

SEQ ID NO: 4688 - RNA, 20 nt, synthetic construct
  source 1..20: mol_type = other RNA
tacccgtgaggtgggggtgg

SEQ ID NO: 4689 - RNA, 20 nt, synthetic construct
  source 1..20: mol_type = other RNA
taccgcacctcccctcccac

SEQ ID NO: 4690 - RNA, 20 nt, synthetic construct
  source 1..20: mol_type = other RNA
tacctacccgccccacccag

SEQ ID NO: 4691 - RNA, 20 nt, synthetic construct
  source 1..20: mol_type = other RNA
tacctacttgaaccagggct

SEQ ID NO: 4692 - RNA, 20 nt, synthetic construct
  source 1..20: mol_type = other RNA
tacctagccgaggctctctg

SEQ ID NO: 4693 - RNA, 20 nt, synthetic construct
  source 1..20: mol_type = other RNA
taccttcgccacccccacca

SEQ ID NO: 4694 - RNA, 20 nt, synthetic construct
  source 1..20: mol_type = other RNA
taccttgtcccaggcgctgc

SEQ ID NO: 4695 - RNA, 20 nt, synthetic construct
  source 1..20: mol_type = other RNA
tacctttcccttgaggagag

SEQ ID NO: 4696 - RNA, 20 nt, synthetic construct
  source 1..20: mol_type = other RNA
tacgcagccgcttagcgact

SEQ ID NO: 4697 - RNA, 20 nt, synthetic construct
  source 1..20: mol_type = other RNA
tacgccatttgtgttttcac

SEQ ID NO: 4698 - RNA, 20 nt, synthetic construct
  source 1..20: mol_type = other RNA
tacgccgtcgggagtacgca

SEQ ID NO: 4699 - RNA, 20 nt, synthetic construct
  source 1..20: mol_type = other RNA
tacggaggggagatcgcggc

SEQ ID NO: 4700 - RNA, 20 nt, synthetic construct
  source 1..20: mol_type = other RNA
tacgggccattcccggccag

SEQ ID NO: 4701 - RNA, 20 nt, synthetic construct
  source 1..20: mol_type = other RNA
tacggtcctccccgaggccg

SEQ ID NO: 4702 - RNA, 20 nt, synthetic construct
  source 1..20: mol_type = other RNA
tacgttgggagggaaagggg

SEQ ID NO: 4703 - RNA, 20 nt, synthetic construct
  source 1..20: mol_type = other RNA
tactccaaccagaatacgcc

SEQ ID NO: 4704 - RNA, 20 nt, synthetic construct
  source 1..20: mol_type = other RNA
tactccacgtttacctttcc

SEQ ID NO: 4705 - RNA, 20 nt, synthetic construct
  source 1..20: mol_type = other RNA
tactcccgacggcgtaactg

SEQ ID NO: 4706 - RNA, 20 nt, synthetic construct
  source 1..20: mol_type = other RNA
tactggctcgagtctcacat

SEQ ID NO: 4707 - RNA, 20 nt, synthetic construct
  source 1..20: mol_type = other RNA
tactgtgttggcggactggc

SEQ ID NO: 4708 - RNA, 20 nt, synthetic construct
  source 1..20: mol_type = other RNA
tacttgaaccagggctcttt

SEQ ID NO: 4709 - RNA, 20 nt, synthetic construct
  source 1..20: mol_type = other RNA
tacttgccttgggcgtggag

SEQ ID NO: 4710 - RNA, 20 nt, synthetic construct
  source 1..20: mol_type = other RNA
tagaaggggctttcccaaca

SEQ ID NO: 4711 - RNA, 20 nt, synthetic construct
  source 1..20: mol_type = other RNA
tagaatcaattagcatagaa

SEQ ID NO: 4712 - RNA, 20 nt, synthetic construct
  source 1..20: mol_type = other RNA
tagagaagaggctgtgcttc

SEQ ID NO: 4713 - RNA, 20 nt, synthetic construct
  source 1..20: mol_type = other RNA
tagagatgctgggtgtgcgg

SEQ ID NO: 4714 - RNA, 20 nt, synthetic construct
  source 1..20: mol_type = other RNA
tagagggggatctctctccc

SEQ ID NO: 4715 - RNA, 20 nt, synthetic construct
  source 1..20: mol_type = other RNA
tagagtccttgcttgtctca

SEQ ID NO: 4716 - RNA, 20 nt, synthetic construct
  source 1..20: mol_type = other RNA
tagattagagggggatctct

SEQ ID NO: 4717 - RNA, 20 nt, synthetic construct
  source 1..20: mol_type = other RNA
tagcaagggcccggtcccac

SEQ ID NO: 4718 - RNA, 20 nt, synthetic construct
  source 1..20: mol_type = other RNA
tagcaggtcgggcttgtctc

SEQ ID NO: 4719 - RNA, 20 nt, synthetic construct
  source 1..20: mol_type = other RNA
tagcatagaaggggctttcc

SEQ ID NO: 4720 - RNA, 20 nt, synthetic construct
  source 1..20: mol_type = other RNA
tagccacccatccccccagt

SEQ ID NO: 4721 - RNA, 20 nt, synthetic construct
  source 1..20: mol_type = other RNA
tagccgaggctctctgagga

SEQ ID NO: 4722 - RNA, 20 nt, synthetic construct
  source 1..20: mol_type = other RNA
tagccggaagcgctcctccc

SEQ ID NO: 4723 - RNA, 20 nt, synthetic construct
  source 1..20: mol_type = other RNA
tagcctcgttgaatgtgtag

SEQ ID NO: 4724 - RNA, 20 nt, synthetic construct
  source 1..20: mol_type = other RNA
tagcctcttgtcgccgattg

SEQ ID NO: 4725 - RNA, 20 nt, synthetic construct
  source 1..20: mol_type = other RNA
tagcgactctcgcgttgccc

SEQ ID NO: 4726 - RNA, 20 nt, synthetic construct
  source 1..20: mol_type = other RNA
taggaaagagccctggttca

SEQ ID NO: 4727 - RNA, 20 nt, synthetic construct
  source 1..20: mol_type = other RNA
taggaggatgctgccacttc

SEQ ID NO: 4728 - RNA, 20 nt, synthetic construct
  source 1..20: mol_type = other RNA
taggcagttcccaggaaagg

SEQ ID NO: 4729 - RNA, 20 nt, synthetic construct
  source 1..20: mol_type = other RNA
taggcccaacgcggcgccac

SEQ ID NO: 4730 - RNA, 20 nt, synthetic construct
  source 1..20: mol_type = other RNA
taggcgacccaactccccct

SEQ ID NO: 4731 - RNA, 20 nt, synthetic construct
  source 1..20: mol_type = other RNA
taggcggccccggcggcttc

SEQ ID NO: 4732 - RNA, 20 nt, synthetic construct
  source 1..20: mol_type = other RNA
tagggagtgggggatcgggg

SEQ ID NO: 4733 - RNA, 20 nt, synthetic construct
  source 1..20: mol_type = other RNA
taggggagcggaactctggt

SEQ ID NO: 4734 - RNA, 20 nt, synthetic construct
  source 1..20: mol_type = other RNA
taggggggccgtctggtggc

SEQ ID NO: 4735 - RNA, 20 nt, synthetic construct
  source 1..20: mol_type = other RNA
tagggttcgagcctggagtt

SEQ ID NO: 4736 - RNA, 20 nt, synthetic construct
  source 1..20: mol_type = other RNA
taggtaaatcgcatgagagg

SEQ ID NO: 4737 - RNA, 20 nt, synthetic construct
  source 1..20: mol_type = other RNA
taggtaggggagcggaactc

SEQ ID NO: 4738 - RNA, 20 nt, synthetic construct
  source 1..20: mol_type = other RNA
taggtaggtggggtgtagag

SEQ ID NO: 4739 - RNA, 20 nt, synthetic construct
  source 1..20: mol_type = other RNA
taggtggggtgtagagatgc

SEQ ID NO: 4740 - RNA, 20 nt, synthetic construct
  source 1..20: mol_type = other RNA
tagtgccggcccccctcttt

SEQ ID NO: 4741 - RNA, 20 nt, synthetic construct
  source 1..20: mol_type = other RNA
tatagaatcaattagcatag

SEQ ID NO: 4742 - RNA, 20 nt, synthetic construct
  source 1..20: mol_type = other RNA
tatagagtccttgcttgtct

SEQ ID NO: 4743 - RNA, 20 nt, synthetic construct
  source 1..20: mol_type = other RNA
tatccaagagaaagaccact

SEQ ID NO: 4744 - RNA, 20 nt, synthetic construct
  source 1..20: mol_type = other RNA
tatctcagacacgctgtggc

SEQ ID NO: 4745 - RNA, 20 nt, synthetic construct
  source 1..20: mol_type = other RNA
tatcttcaaaggcagaaaaa

SEQ ID NO: 4746 - RNA, 20 nt, synthetic construct
  source 1..20: mol_type = other RNA
tatgaattctctttccctct

SEQ ID NO: 4747 - RNA, 20 nt, synthetic construct
  source 1..20: mol_type = other RNA
tatgcctgtgtatttcgagc

SEQ ID NO: 4748 - RNA, 20 nt, synthetic construct
  source 1..20: mol_type = other RNA
tatgctaattgattctatag

SEQ ID NO: 4749 - RNA, 20 nt, synthetic construct
  source 1..20: mol_type = other RNA
tatgttcccgacttcccacg

SEQ ID NO: 4750 - RNA, 20 nt, synthetic construct
  source 1..20: mol_type = other RNA
tattccctttatgaattctc

SEQ ID NO: 4751 - RNA, 20 nt, synthetic construct
  source 1..20: mol_type = other RNA
tattctcacaagatcgttct

SEQ ID NO: 4752 - RNA, 20 nt, synthetic construct
  source 1..20: mol_type = other RNA
tattctggttggagtaaagc

SEQ ID NO: 4753 - RNA, 20 nt, synthetic construct
  source 1..20: mol_type = other RNA
tatttcgagcggagggcagc

SEQ ID NO: 4754 - RNA, 20 nt, synthetic construct
  source 1..20: mol_type = other RNA
tatttttctgcctttgaaga

SEQ ID NO: 4755 - RNA, 20 nt, synthetic construct
  source 1..20: mol_type = other RNA
tcaaaggcagaaaaatattc

SEQ ID NO: 4756 - RNA, 20 nt, synthetic construct
  source 1..20: mol_type = other RNA
tcaacgaggctatctcagac

SEQ ID NO: 4757 - RNA, 20 nt, synthetic construct
  source 1..20: mol_type = other RNA
tcaactccaggctcgaaccc

SEQ ID NO: 4758 - RNA, 20 nt, synthetic construct
  source 1..20: mol_type = other RNA
tcaagggaaaggtaaacgtg

SEQ ID NO: 4759 - RNA, 20 nt, synthetic construct
  source 1..20: mol_type = other RNA
tcaagtaggtaaatcgcatg

SEQ ID NO: 4760 - RNA, 20 nt, synthetic construct
  source 1..20: mol_type = other RNA
tcaattagcatagaaggggc

SEQ ID NO: 4761 - RNA, 20 nt, synthetic construct
  source 1..20: mol_type = other RNA
tcacaagatcgttctccacg

SEQ ID NO: 4762 - RNA, 20 nt, synthetic construct
  source 1..20: mol_type = other RNA
tcacaaggccgcgagaacgg

SEQ ID NO: 4763 - RNA, 20 nt, synthetic construct
  source 1..20: mol_type = other RNA
tcacacacggcgggaggaga

SEQ ID NO: 4764 - RNA, 20 nt, synthetic construct
  source 1..20: mol_type = other RNA
tcacatgagcgaaaccactg

SEQ ID NO: 4765 - RNA, 20 nt, synthetic construct
  source 1..20: mol_type = other RNA
tcacattcccgacttacacg

SEQ ID NO: 4766 - RNA, 20 nt, synthetic construct
  source 1..20: mol_type = other RNA
tcacccccctcgccgccttg

SEQ ID NO: 4767 - RNA, 20 nt, synthetic construct
  source 1..20: mol_type = other RNA
tcaccccctttcctgggaac

SEQ ID NO: 4768 - RNA, 20 nt, synthetic construct
  source 1..20: mol_type = other RNA
tcacctcctccgtctccccg

SEQ ID NO: 4769 - RNA, 20 nt, synthetic construct
  source 1..20: mol_type = other RNA
tcacgatcgggccccagggg

SEQ ID NO: 4770 - RNA, 20 nt, synthetic construct
  source 1..20: mol_type = other RNA
tcacgcagccccagtcccgc

SEQ ID NO: 4771 - RNA, 20 nt, synthetic construct
  source 1..20: mol_type = other RNA
tcacgggtacgggccattcc

SEQ ID NO: 4772 - RNA, 20 nt, synthetic construct
  source 1..20: mol_type = other RNA
tcactcagcccgctgcccga

SEQ ID NO: 4773 - RNA, 20 nt, synthetic construct
  source 1..20: mol_type = other RNA
tcactgaccctcccctcccg

SEQ ID NO: 4774 - RNA, 20 nt, synthetic construct
  source 1..20: mol_type = other RNA
tcacttcttgggcgtcagtg

SEQ ID NO: 4775 - RNA, 20 nt, synthetic construct
  source 1..20: mol_type = other RNA
tcagacacgctgtggcacac

SEQ ID NO: 4776 - RNA, 20 nt, synthetic construct
  source 1..20: mol_type = other RNA
tcagagactcacgcagcccc

SEQ ID NO: 4777 - RNA, 20 nt, synthetic construct
  source 1..20: mol_type = other RNA
tcagagagcctcggctaggt

SEQ ID NO: 4778 - RNA, 20 nt, synthetic construct
  source 1..20: mol_type = other RNA
tcagagttgtctgtcacaag

SEQ ID NO: 4779 - RNA, 20 nt, synthetic construct
  source 1..20: mol_type = other RNA
tcagatggctgcttcccaaa

SEQ ID NO: 4780 - RNA, 20 nt, synthetic construct
  source 1..20: mol_type = other RNA
tcagcccgctgcccgagcgg

SEQ ID NO: 4781 - RNA, 20 nt, synthetic construct
  source 1..20: mol_type = other RNA
tcagcggaagccgccggggc

SEQ ID NO: 4782 - RNA, 20 nt, synthetic construct
  source 1..20: mol_type = other RNA
tcaggacgcttcccctcccc

SEQ ID NO: 4783 - RNA, 20 nt, synthetic construct
  source 1..20: mol_type = other RNA
tcaggcggtgggaacccggg

SEQ ID NO: 4784 - RNA, 20 nt, synthetic construct
  source 1..20: mol_type = other RNA
tcaggtgtcgaagacaagca

SEQ ID NO: 4785 - RNA, 20 nt, synthetic construct
  source 1..20: mol_type = other RNA
tcagtgaaatcggctctggc

SEQ ID NO: 4786 - RNA, 20 nt, synthetic construct
  source 1..20: mol_type = other RNA
tcagtggcgtttccgctcgg

SEQ ID NO: 4787 - RNA, 20 nt, synthetic construct
  source 1..20: mol_type = other RNA
tcagtggtctttctcttgga

SEQ ID NO: 4788 - RNA, 20 nt, synthetic construct
  source 1..20: mol_type = other RNA
tcagttacgccgtcgggagt

SEQ ID NO: 4789 - RNA, 20 nt, synthetic construct
  source 1..20: mol_type = other RNA
tcataaagggaatatttttc

SEQ ID NO: 4790 - RNA, 20 nt, synthetic construct
  source 1..20: mol_type = other RNA
tcatgcgatttacctacttg

SEQ ID NO: 4791 - RNA, 20 nt, synthetic construct
  source 1..20: mol_type = other RNA
tcatgtgagactcgagccag

SEQ ID NO: 4792 - RNA, 20 nt, synthetic construct
  source 1..20: mol_type = other RNA
tcatgtttttcctgggtcag

SEQ ID NO: 4793 - RNA, 20 nt, synthetic construct
  source 1..20: mol_type = other RNA
tccaaccagaatacgccatt

SEQ ID NO: 4794 - RNA, 20 nt, synthetic construct
  source 1..20: mol_type = other RNA
tccaagagaaagaccactga

SEQ ID NO: 4795 - RNA, 20 nt, synthetic construct
  source 1..20: mol_type = other RNA
tccacgcccaaggcaagtaa

SEQ ID NO: 4796 - RNA, 20 nt, synthetic construct
  source 1..20: mol_type = other RNA
tccacgtttacctttccctt

SEQ ID NO: 4797 - RNA, 20 nt, synthetic construct
  source 1..20: mol_type = other RNA
tccagaagtctcggccggca

SEQ ID NO: 4798 - RNA, 20 nt, synthetic construct
  source 1..20: mol_type = other RNA
tccagccacccctttccctc

SEQ ID NO: 4799 - RNA, 20 nt, synthetic construct
  source 1..20: mol_type = other RNA
tccagcgcgcgcttcctgcc

SEQ ID NO: 4800 - RNA, 20 nt, synthetic construct
  source 1..20: mol_type = other RNA
tccaggaagattacggaggg

SEQ ID NO: 4801 - RNA, 20 nt, synthetic construct
  source 1..20: mol_type = other RNA
tccaggctcgaaccctacac

SEQ ID NO: 4802 - RNA, 20 nt, synthetic construct
  source 1..20: mol_type = other RNA
tccatatccaagagaaagac

SEQ ID NO: 4803 - RNA, 20 nt, synthetic construct
  source 1..20: mol_type = other RNA
tcccaaaggcattaccttcg

SEQ ID NO: 4804 - RNA, 20 nt, synthetic construct
  source 1..20: mol_type = other RNA
tcccaacagtttaactttcc

SEQ ID NO: 4805 - RNA, 20 nt, synthetic construct
  source 1..20: mol_type = other RNA
tcccaacgtaacaaacatta

SEQ ID NO: 4806 - RNA, 20 nt, synthetic construct
  source 1..20: mol_type = other RNA
tcccacagcttcgacagcca

SEQ ID NO: 4807 - RNA, 20 nt, synthetic construct
  source 1..20: mol_type = other RNA
tcccaccagagttccgctcc

SEQ ID NO: 4808 - RNA, 20 nt, synthetic construct
  source 1..20: mol_type = other RNA
tcccaccctccccttccttc

SEQ ID NO: 4809 - RNA, 20 nt, synthetic construct
  source 1..20: mol_type = other RNA
tcccaccgcctgaagggcga

SEQ ID NO: 4810 - RNA, 20 nt, synthetic construct
  source 1..20: mol_type = other RNA
tcccacctcagatggctgct

SEQ ID NO: 4811 - RNA, 20 nt, synthetic construct
  source 1..20: mol_type = other RNA
tcccacgggaaaggcaaccc

SEQ ID NO: 4812 - RNA, 20 nt, synthetic construct
  source 1..20: mol_type = other RNA
tcccaggaaagggggtgaag

SEQ ID NO: 4813 - RNA, 20 nt, synthetic construct
  source 1..20: mol_type = other RNA
tcccagggagagagatcccc

SEQ ID NO: 4814 - RNA, 20 nt, synthetic construct
  source 1..20: mol_type = other RNA
tccccaagctcttaggagga

SEQ ID NO: 4815 - RNA, 20 nt, synthetic construct
  source 1..20: mol_type = other RNA
tcccccaacgcctcttcacc

SEQ ID NO: 4816 - RNA, 20 nt, synthetic construct
  source 1..20: mol_type = other RNA
tcccccacccccacgagtgc

SEQ ID NO: 4817 - RNA, 20 nt, synthetic construct
  source 1..20: mol_type = other RNA
tcccccactccctacccccg

SEQ ID NO: 4818 - RNA, 20 nt, synthetic construct
  source 1..20: mol_type = other RNA
tccccccagtgtaccgcacc

SEQ ID NO: 4819 - RNA, 20 nt, synthetic construct
  source 1..20: mol_type = other RNA
tcccccgaaggaaggggagg

SEQ ID NO: 4820 - RNA, 20 nt, synthetic construct
  source 1..20: mol_type = other RNA
tccccctctaatctaggcga

SEQ ID NO: 4821 - RNA, 20 nt, synthetic construct
  source 1..20: mol_type = other RNA
tccccctttcatgtttttcc

SEQ ID NO: 4822 - RNA, 20 nt, synthetic construct
  source 1..20: mol_type = other RNA
tccccgaggccgagcgccgc

SEQ ID NO: 4823 - RNA, 20 nt, synthetic construct
  source 1..20: mol_type = other RNA
tccccgatcccccactccct

SEQ ID NO: 4824 - RNA, 20 nt, synthetic construct
  source 1..20: mol_type = other RNA
tccccgcctttggctcgctc

SEQ ID NO: 4825 - RNA, 20 nt, synthetic construct
  source 1..20: mol_type = other RNA
tccccgcgctcgctctcctt

SEQ ID NO: 4826 - RNA, 20 nt, synthetic construct
  source 1..20: mol_type = other RNA
tccccgtgcggtcagtggcg

SEQ ID NO: 4827 - RNA, 20 nt, synthetic construct
  source 1..20: mol_type = other RNA
tccccgtggcgtgtgccaca

SEQ ID NO: 4828 - RNA, 20 nt, synthetic construct
  source 1..20: mol_type = other RNA
tcccctacctagccgaggct

SEQ ID NO: 4829 - RNA, 20 nt, synthetic construct
  source 1..20: mol_type = other RNA
tcccctcccaccagagttcc

SEQ ID NO: 4830 - RNA, 20 nt, synthetic construct
  source 1..20: mol_type = other RNA
tcccctcccccaacgcctct

SEQ ID NO: 4831 - RNA, 20 nt, synthetic construct
  source 1..20: mol_type = other RNA
tcccctccgtaatcttcctg

SEQ ID NO: 4832 - RNA, 20 nt, synthetic construct
  source 1..20: mol_type = other RNA
tcccctggggcccgatcgtg

SEQ ID NO: 4833 - RNA, 20 nt, synthetic construct
  source 1..20: mol_type = other RNA
tccccttccttcgggggagt

SEQ ID NO: 4834 - RNA, 20 nt, synthetic construct
  source 1..20: mol_type = other RNA
tcccgacggcgtaactgaca

SEQ ID NO: 4835 - RNA, 20 nt, synthetic construct
  source 1..20: mol_type = other RNA
tcccgacttacacgcagagg

SEQ ID NO: 4836 - RNA, 20 nt, synthetic construct
  source 1..20: mol_type = other RNA
tcccgacttcccacgggaaa

SEQ ID NO: 4837 - RNA, 20 nt, synthetic construct
  source 1..20: mol_type = other RNA
tcccgccagtccgccaacac

SEQ ID NO: 4838 - RNA, 20 nt, synthetic construct
  source 1..20: mol_type = other RNA
tcccgccgcgccattggcct

SEQ ID NO: 4839 - RNA, 20 nt, synthetic construct
  source 1..20: mol_type = other RNA
tcccgccgtgtgtgaaaaca

SEQ ID NO: 4840 - RNA, 20 nt, synthetic construct
  source 1..20: mol_type = other RNA
tcccgcctgcatccagccac

SEQ ID NO: 4841 - RNA, 20 nt, synthetic construct
  source 1..20: mol_type = other RNA
tcccggccaggaaacgccgt

SEQ ID NO: 4842 - RNA, 20 nt, synthetic construct
  source 1..20: mol_type = other RNA
tcccgggaggcggcaggact

SEQ ID NO: 4843 - RNA, 20 nt, synthetic construct
  source 1..20: mol_type = other RNA
tcccgtgggaagtcgggaac

SEQ ID NO: 4844 - RNA, 20 nt, synthetic construct
  source 1..20: mol_type = other RNA
tccctacccccgttctcgcg

SEQ ID NO: 4845 - RNA, 20 nt, synthetic construct
  source 1..20: mol_type = other RNA
tccctcccaacgtaacaaac

SEQ ID NO: 4846 - RNA, 20 nt, synthetic construct
  source 1..20: mol_type = other RNA
tccctccccctccggttgcc

SEQ ID NO: 4847 - RNA, 20 nt, synthetic construct
  source 1..20: mol_type = other RNA
tccctcccctggggcccgat

SEQ ID NO: 4848 - RNA, 20 nt, synthetic construct
  source 1..20: mol_type = other RNA
tccctcccgcctgcatccag

SEQ ID NO: 4849 - RNA, 20 nt, synthetic construct
  source 1..20: mol_type = other RNA
tccctctcatgcgatttacc

SEQ ID NO: 4850 - RNA, 20 nt, synthetic construct
  source 1..20: mol_type = other RNA
tccctctcgttttctggctt

SEQ ID NO: 4851 - RNA, 20 nt, synthetic construct
  source 1..20: mol_type = other RNA
tccctctgcgagagcaatgg

SEQ ID NO: 4852 - RNA, 20 nt, synthetic construct
  source 1..20: mol_type = other RNA
tccctctgcgtgtaagtcgg

SEQ ID NO: 4853 - RNA, 20 nt, synthetic construct
  source 1..20: mol_type = other RNA
tccctgggaaaatggggtgt

SEQ ID NO: 4854 - RNA, 20 nt, synthetic construct
  source 1..20: mol_type = other RNA
tcccttctccctccccctcc

SEQ ID NO: 4855 - RNA, 20 nt, synthetic construct
  source 1..20: mol_type = other RNA
tcccttgaggagaggcctct

SEQ ID NO: 4856 - RNA, 20 nt, synthetic construct
  source 1..20: mol_type = other RNA
tccctttatgaattctcttt

SEQ ID NO: 4857 - RNA, 20 nt, synthetic construct
  source 1..20: mol_type = other RNA
tccgacagaaaagagaccga

SEQ ID NO: 4858 - RNA, 20 nt, synthetic construct
  source 1..20: mol_type = other RNA
tccgccaacacagtagtgcc

SEQ ID NO: 4859 - RNA, 20 nt, synthetic construct
  source 1..20: mol_type = other RNA
tccgcccaccgccccgcacc

SEQ ID NO: 4860 - RNA, 20 nt, synthetic construct
  source 1..20: mol_type = other RNA
tccgccccgggttcccaccg

SEQ ID NO: 4861 - RNA, 20 nt, synthetic construct
  source 1..20: mol_type = other RNA
tccgcctttctgccccccac

SEQ ID NO: 4862 - RNA, 20 nt, synthetic construct
  source 1..20: mol_type = other RNA
tccgctcccctacctagccg

SEQ ID NO: 4863 - RNA, 20 nt, synthetic construct
  source 1..20: mol_type = other RNA
tccgctcccttctccctccc

SEQ ID NO: 4864 - RNA, 20 nt, synthetic construct
  source 1..20: mol_type = other RNA
tccgctcgaaatacacaggc

SEQ ID NO: 4865 - RNA, 20 nt, synthetic construct
  source 1..20: mol_type = other RNA
tccgctcgggcagcgggctg

SEQ ID NO: 4866 - RNA, 20 nt, synthetic construct
  source 1..20: mol_type = other RNA
tccgctgattggcggcgagt

SEQ ID NO: 4867 - RNA, 20 nt, synthetic construct
  source 1..20: mol_type = other RNA
tccggctagcctcttgtcgc

SEQ ID NO: 4868 - RNA, 20 nt, synthetic construct
  source 1..20: mol_type = other RNA
tccggctcctcagagagcct

SEQ ID NO: 4869 - RNA, 20 nt, synthetic construct
  source 1..20: mol_type = other RNA
tccggttgccgcagggcggg

SEQ ID NO: 4870 - RNA, 20 nt, synthetic construct
  source 1..20: mol_type = other RNA
tccggtttcgagcattttcc

SEQ ID NO: 4871 - RNA, 20 nt, synthetic construct
  source 1..20: mol_type = other RNA
tccgtaatcttcctggacgc

SEQ ID NO: 4872 - RNA, 20 nt, synthetic construct
  source 1..20: mol_type = other RNA
tccgtccggtttcgagcatt

SEQ ID NO: 4873 - RNA, 20 nt, synthetic construct
  source 1..20: mol_type = other RNA
tccgtctccccgcgctcgct

SEQ ID NO: 4874 - RNA, 20 nt, synthetic construct
  source 1..20: mol_type = other RNA
tcctaagagcttggggaggg

SEQ ID NO: 4875 - RNA, 20 nt, synthetic construct
  source 1..20: mol_type = other RNA
tcctacactcctcttcacat

SEQ ID NO: 4876 - RNA, 20 nt, synthetic construct
  source 1..20: mol_type = other RNA
tcctcaagggaaaggtaaac

SEQ ID NO: 4877 - RNA, 20 nt, synthetic construct
  source 1..20: mol_type = other RNA
tcctcagagagcctcggcta

SEQ ID NO: 4878 - RNA, 20 nt, synthetic construct
  source 1..20: mol_type = other RNA
tcctcccaccctccccttcc

SEQ ID NO: 4879 - RNA, 20 nt, synthetic construct
  source 1..20: mol_type = other RNA
tcctcccccacccccacgag

SEQ ID NO: 4880 - RNA, 20 nt, synthetic construct
  source 1..20: mol_type = other RNA
tcctccccgaggccgagcgc

SEQ ID NO: 4881 - RNA, 20 nt, synthetic construct
  source 1..20: mol_type = other RNA
tcctcccgccgtgtgtgaaa

SEQ ID NO: 4882 - RNA, 20 nt, synthetic construct
  source 1..20: mol_type = other RNA
tcctccctctgcgagagcaa

SEQ ID NO: 4883 - RNA, 20 nt, synthetic construct
  source 1..20: mol_type = other RNA
tcctccgtctccccgcgctc

SEQ ID NO: 4884 - RNA, 20 nt, synthetic construct
  source 1..20: mol_type = other RNA
tcctcctaagagcttgggga

SEQ ID NO: 4885 - RNA, 20 nt, synthetic construct
  source 1..20: mol_type = other RNA
tcctcttcacattcccgact

SEQ ID NO: 4886 - RNA, 20 nt, synthetic construct
  source 1..20: mol_type = other RNA
tcctgacccaggaaaaacat

SEQ ID NO: 4887 - RNA, 20 nt, synthetic construct
  source 1..20: mol_type = other RNA
tcctgccacgttgcgcaggg

SEQ ID NO: 4888 - RNA, 20 nt, synthetic construct
  source 1..20: mol_type = other RNA
tcctgccgcctcccgggagt

SEQ ID NO: 4889 - RNA, 20 nt, synthetic construct
  source 1..20: mol_type = other RNA
tcctgcggcgggaggggagg

SEQ ID NO: 4890 - RNA, 20 nt, synthetic construct
  source 1..20: mol_type = other RNA
tcctggacgccttccctctc

SEQ ID NO: 4891 - RNA, 20 nt, synthetic construct
  source 1..20: mol_type = other RNA
tcctggccgggaatggcccg

SEQ ID NO: 4892 - RNA, 20 nt, synthetic construct
  source 1..20: mol_type = other RNA
tcctgggaactgcctactcc

SEQ ID NO: 4893 - RNA, 20 nt, synthetic construct
  source 1..20: mol_type = other RNA
tcctgggtcaggacgcttcc

SEQ ID NO: 4894 - RNA, 20 nt, synthetic construct
  source 1..20: mol_type = other RNA
tcctgtcagttacgccgtcg

SEQ ID NO: 4895 - RNA, 20 nt, synthetic construct
  source 1..20: mol_type = other RNA
tccttcgggggagtcggttt

SEQ ID NO: 4896 - RNA, 20 nt, synthetic construct
  source 1..20: mol_type = other RNA
tccttgcttgtctcacttct

SEQ ID NO: 4897 - RNA, 20 nt, synthetic construct
  source 1..20: mol_type = other RNA
tccttgggtcgtgggcctgg

SEQ ID NO: 4898 - RNA, 20 nt, synthetic construct
  source 1..20: mol_type = other RNA
tcgaaaccggacggagccat

SEQ ID NO: 4899 - RNA, 20 nt, synthetic construct
  source 1..20: mol_type = other RNA
tcgaaccctacacattcaac

SEQ ID NO: 4900 - RNA, 20 nt, synthetic construct
  source 1..20: mol_type = other RNA
tcgaagacaagcaggcggcg

SEQ ID NO: 4901 - RNA, 20 nt, synthetic construct
  source 1..20: mol_type = other RNA
tcgaagctgtgggaccgggc

SEQ ID NO: 4902 - RNA, 20 nt, synthetic construct
  source 1..20: mol_type = other RNA
tcgacacctgattggctgtc

SEQ ID NO: 4903 - RNA, 20 nt, synthetic construct
  source 1..20: mol_type = other RNA
tcgacagccaatcaggtgtc

SEQ ID NO: 4904 - RNA, 20 nt, synthetic construct
  source 1..20: mol_type = other RNA
tcgagcattttccgctccct

SEQ ID NO: 4905 - RNA, 20 nt, synthetic construct
  source 1..20: mol_type = other RNA
tcgagccagtagcaagggcc

SEQ ID NO: 4906 - RNA, 20 nt, synthetic construct
  source 1..20: mol_type = other RNA
tcgagcctggagttgagcca

SEQ ID NO: 4907 - RNA, 20 nt, synthetic construct
  source 1..20: mol_type = other RNA
tcgagcggagggcagcaaga

SEQ ID NO: 4908 - RNA, 20 nt, synthetic construct
  source 1..20: mol_type = other RNA
tcgagtcctgccgcctcccg

SEQ ID NO: 4909 - RNA, 20 nt, synthetic construct
  source 1..20: mol_type = other RNA
tcgagtctcacatgagcgaa

SEQ ID NO: 4910 - RNA, 20 nt, synthetic construct
  source 1..20: mol_type = other RNA
tcgagttaggcccaacgcgg

SEQ ID NO: 4911 - RNA, 20 nt, synthetic construct
  source 1..20: mol_type = other RNA
tcgcagagggaggagcgctt

SEQ ID NO: 4912 - RNA, 20 nt, synthetic construct
  source 1..20: mol_type = other RNA
tcgcatgagagggaaagtta

SEQ ID NO: 4913 - RNA, 20 nt, synthetic construct
  source 1..20: mol_type = other RNA
tcgccacccccaccacacgt

SEQ ID NO: 4914 - RNA, 20 nt, synthetic construct
  source 1..20: mol_type = other RNA
tcgcccttcaggcggtggga

SEQ ID NO: 4915 - RNA, 20 nt, synthetic construct
  source 1..20: mol_type = other RNA
tcgccgattggccgtttctc

SEQ ID NO: 4916 - RNA, 20 nt, synthetic construct
  source 1..20: mol_type = other RNA
tcgccgccaatcagcggaag

SEQ ID NO: 4917 - RNA, 20 nt, synthetic construct
  source 1..20: mol_type = other RNA
tcgccgccttgcacacaccg

SEQ ID NO: 4918 - RNA, 20 nt, synthetic construct
  source 1..20: mol_type = other RNA
tcgcctagattagaggggga

SEQ ID NO: 4919 - RNA, 20 nt, synthetic construct
  source 1..20: mol_type = other RNA
tcgcggcccccagagcgatc

SEQ ID NO: 4920 - RNA, 20 nt, synthetic construct
  source 1..20: mol_type = other RNA
tcgcggccttgtgacagaca

SEQ ID NO: 4921 - RNA, 20 nt, synthetic construct
  source 1..20: mol_type = other RNA
tcgcgttgccccctgggtgg

SEQ ID NO: 4922 - RNA, 20 nt, synthetic construct
  source 1..20: mol_type = other RNA
tcgctaagcggctgcgtact

SEQ ID NO: 4923 - RNA, 20 nt, synthetic construct
  source 1..20: mol_type = other RNA
tcgctcatgtgagactcgag

SEQ ID NO: 4924 - RNA, 20 nt, synthetic construct
  source 1..20: mol_type = other RNA
tcgctccgcctttctgcccc

SEQ ID NO: 4925 - RNA, 20 nt, synthetic construct
  source 1..20: mol_type = other RNA
tcgctctccttgggtcgtgg

SEQ ID NO: 4926 - RNA, 20 nt, synthetic construct
  source 1..20: mol_type = other RNA
tcgctctgggggccgcgatc

SEQ ID NO: 4927 - RNA, 20 nt, synthetic construct
  source 1..20: mol_type = other RNA
tcggacccttaccttgtccc

SEQ ID NO: 4928 - RNA, 20 nt, synthetic construct
  source 1..20: mol_type = other RNA
tcggcctcggggaggaccgt

SEQ ID NO: 4929 - RNA, 20 nt, synthetic construct
  source 1..20: mol_type = other RNA
tcggcgacaagaggctagcc

SEQ ID NO: 4930 - RNA, 20 nt, synthetic construct
  source 1..20: mol_type = other RNA
tcggcgctccggctcctcag

SEQ ID NO: 4931 - RNA, 20 nt, synthetic construct
  source 1..20: mol_type = other RNA
tcggctaggtaggggagcgg

SEQ ID NO: 4932 - RNA, 20 nt, synthetic construct
  source 1..20: mol_type = other RNA
tcggctctggcgcgggcgtc

SEQ ID NO: 4933 - RNA, 20 nt, synthetic construct
  source 1..20: mol_type = other RNA
tcgggaacataatgtttgtt

SEQ ID NO: 4934 - RNA, 20 nt, synthetic construct
  source 1..20: mol_type = other RNA
tcgggaatgtgaagaggagt

SEQ ID NO: 4935 - RNA, 20 nt, synthetic construct
  source 1..20: mol_type = other RNA
tcgggagtacgcagccgctt

SEQ ID NO: 4936 - RNA, 20 nt, synthetic construct
  source 1..20: mol_type = other RNA
tcgggcagcgggctgagtga

SEQ ID NO: 4937 - RNA, 20 nt, synthetic construct
  source 1..20: mol_type = other RNA
tcgggccccaggggagggaa

SEQ ID NO: 4938 - RNA, 20 nt, synthetic construct
  source 1..20: mol_type = other RNA
tcgggcttgtctcgcccttc

SEQ ID NO: 4939 - RNA, 20 nt, synthetic construct
  source 1..20: mol_type = other RNA
tcggggaggaccgtaccaac

SEQ ID NO: 4940 - RNA, 20 nt, synthetic construct
  source 1..20: mol_type = other RNA
tcgggggagtcggtttaccc

SEQ ID NO: 4941 - RNA, 20 nt, synthetic construct
  source 1..20: mol_type = other RNA
tcggtctcttttctgtcgga

SEQ ID NO: 4942 - RNA, 20 nt, synthetic construct
  source 1..20: mol_type = other RNA
tcggtttacccgccgcctgc

SEQ ID NO: 4943 - RNA, 20 nt, synthetic construct
  source 1..20: mol_type = other RNA
tcgtgaggttcggtctcttt

SEQ ID NO: 4944 - RNA, 20 nt, synthetic construct
  source 1..20: mol_type = other RNA
tcgtgggcctggccctcccc

SEQ ID NO: 4945 - RNA, 20 nt, synthetic construct
  source 1..20: mol_type = other RNA
tcgtgggggtgggggaggag

SEQ ID NO: 4946 - RNA, 20 nt, synthetic construct
  source 1..20: mol_type = other RNA
tcgttctccacgcccaaggc

SEQ ID NO: 4947 - RNA, 20 nt, synthetic construct
  source 1..20: mol_type = other RNA
tcgttgaatgtgtagggttc

SEQ ID NO: 4948 - RNA, 20 nt, synthetic construct
  source 1..20: mol_type = other RNA
tcgttttacttgccttgggc

SEQ ID NO: 4949 - RNA, 20 nt, synthetic construct
  source 1..20: mol_type = other RNA
tcgttttctggcttcccacc

SEQ ID NO: 4950 - RNA, 20 nt, synthetic construct
  source 1..20: mol_type = other RNA
tctaatctaggcgacccaac

SEQ ID NO: 4951 - RNA, 20 nt, synthetic construct
  source 1..20: mol_type = other RNA
tctacaccccacctacctac

SEQ ID NO: 4952 - RNA, 20 nt, synthetic construct
  source 1..20: mol_type = other RNA
tctaggcgacccaactcccc

SEQ ID NO: 4953 - RNA, 20 nt, synthetic construct
  source 1..20: mol_type = other RNA
tctaggcggccccggcggct

SEQ ID NO: 4954 - RNA, 20 nt, synthetic construct
  source 1..20: mol_type = other RNA
tctatagaatcaattagcat

SEQ ID NO: 4955 - RNA, 20 nt, synthetic construct
  source 1..20: mol_type = other RNA
tctatagagtccttgcttgt

SEQ ID NO: 4956 - RNA, 20 nt, synthetic construct
  source 1..20: mol_type = other RNA
tctatgctaattgattctat

SEQ ID NO: 4957 - RNA, 20 nt, synthetic construct
  source 1..20: mol_type = other RNA
tctcacaagatcgttctcca

SEQ ID NO: 4958 - RNA, 20 nt, synthetic construct
  source 1..20: mol_type = other RNA
tctcacatgagcgaaaccac

SEQ ID NO: 4959 - RNA, 20 nt, synthetic construct
  source 1..20: mol_type = other RNA
tctcacccccctcgccgcct

SEQ ID NO: 4960 - RNA, 20 nt, synthetic construct
  source 1..20: mol_type = other RNA
tctcacttcttgggcgtcag

SEQ ID NO: 4961 - RNA, 20 nt, synthetic construct
  source 1..20: mol_type = other RNA
tctcagacacgctgtggcac

SEQ ID NO: 4962 - RNA, 20 nt, synthetic construct
  source 1..20: mol_type = other RNA
tctcatgcgatttacctact

SEQ ID NO: 4963 - RNA, 20 nt, synthetic construct
  source 1..20: mol_type = other RNA
tctccacgcccaaggcaagt

SEQ ID NO: 4964 - RNA, 20 nt, synthetic construct
  source 1..20: mol_type = other RNA
tctccccgatcccccactcc

SEQ ID NO: 4965 - RNA, 20 nt, synthetic construct
  source 1..20: mol_type = other RNA
tctccccgcgctcgctctcc

SEQ ID NO: 4966 - RNA, 20 nt, synthetic construct
  source 1..20: mol_type = other RNA
tctcccctccgtaatcttcc

SEQ ID NO: 4967 - RNA, 20 nt, synthetic construct
  source 1..20: mol_type = other RNA
tctccctccccctccggttg

SEQ ID NO: 4968 - RNA, 20 nt, synthetic construct
  source 1..20: mol_type = other RNA
tctccctgggaaaatggggt

SEQ ID NO: 4969 - RNA, 20 nt, synthetic construct
  source 1..20: mol_type = other RNA
tctccgcccaccgccccgca

SEQ ID NO: 4970 - RNA, 20 nt, synthetic construct
  source 1..20: mol_type = other RNA
tctcctcaagggaaaggtaa

SEQ ID NO: 4971 - RNA, 20 nt, synthetic construct
  source 1..20: mol_type = other RNA
tctcctcccgccgtgtgtga

SEQ ID NO: 4972 - RNA, 20 nt, synthetic construct
  source 1..20: mol_type = other RNA
tctccttgggtcgtgggcct

SEQ ID NO: 4973 - RNA, 20 nt, synthetic construct
  source 1..20: mol_type = other RNA
tctcgcagagggaggagcgc

SEQ ID NO: 4974 - RNA, 20 nt, synthetic construct
  source 1..20: mol_type = other RNA
tctcgcccttcaggcggtgg

SEQ ID NO: 4975 - RNA, 20 nt, synthetic construct
  source 1..20: mol_type = other RNA
tctcgcggccttgtgacaga

SEQ ID NO: 4976 - RNA, 20 nt, synthetic construct
  source 1..20: mol_type = other RNA
tctcgcgttgccccctgggt

SEQ ID NO: 4977 - RNA, 20 nt, synthetic construct
  source 1..20: mol_type = other RNA
tctcgttttctggcttccca

SEQ ID NO: 4978 - RNA, 20 nt, synthetic construct
  source 1..20: mol_type = other RNA
tctctacaccccacctacct

SEQ ID NO: 4979 - RNA, 20 nt, synthetic construct
  source 1..20: mol_type = other RNA
tctctaggcggccccggcgg

SEQ ID NO: 4980 - RNA, 20 nt, synthetic construct
  source 1..20: mol_type = other RNA
tctctccccgatcccccact

SEQ ID NO: 4981 - RNA, 20 nt, synthetic construct
  source 1..20: mol_type = other RNA
tctctccctgggaaaatggg

SEQ ID NO: 4982 - RNA, 20 nt, synthetic construct
  source 1..20: mol_type = other RNA
tctctctccctgggaaaatg

SEQ ID NO: 4983 - RNA, 20 nt, synthetic construct
  source 1..20: mol_type = other RNA
tctctgaggagccggagcgc

SEQ ID NO: 4984 - RNA, 20 nt, synthetic construct
  source 1..20: mol_type = other RNA
tctctggctccccgtggcgt

SEQ ID NO: 4985 - RNA, 20 nt, synthetic construct
  source 1..20: mol_type = other RNA
tctctttccctctgcgtgta

SEQ ID NO: 4986 - RNA, 20 nt, synthetic construct
  source 1..20: mol_type = other RNA
tctcttttctgtcggaccct

SEQ ID NO: 4987 - RNA, 20 nt, synthetic construct
  source 1..20: mol_type = other RNA
tctgagatagcctcgttgaa

SEQ ID NO: 4988 - RNA, 20 nt, synthetic construct
  source 1..20: mol_type = other RNA
tctgaggagccggagcgccg

SEQ ID NO: 4989 - RNA, 20 nt, synthetic construct
  source 1..20: mol_type = other RNA
tctgaggtgggaagccagaa

SEQ ID NO: 4990 - RNA, 20 nt, synthetic construct
  source 1..20: mol_type = other RNA
tctgatcgctctgggggccg

SEQ ID NO: 4991 - RNA, 20 nt, synthetic construct
  source 1..20: mol_type = other RNA
tctgccccccacccccacct

SEQ ID NO: 4992 - RNA, 20 nt, synthetic construct
  source 1..20: mol_type = other RNA
tctgcctttgaagatattct

SEQ ID NO: 4993 - RNA, 20 nt, synthetic construct
  source 1..20: mol_type = other RNA
tctgcgagagcaatggctcc

SEQ ID NO: 4994 - RNA, 20 nt, synthetic construct
  source 1..20: mol_type = other RNA
tctgcgtgtaagtcgggaat

SEQ ID NO: 4995 - RNA, 20 nt, synthetic construct
  source 1..20: mol_type = other RNA
tctggccccgcgcccctgcg

SEQ ID NO: 4996 - RNA, 20 nt, synthetic construct
  source 1..20: mol_type = other RNA
tctggcgcgggcgtcctccc

SEQ ID NO: 4997 - RNA, 20 nt, synthetic construct
  source 1..20: mol_type = other RNA
tctggctcaactccaggctc

SEQ ID NO: 4998 - RNA, 20 nt, synthetic construct
  source 1..20: mol_type = other RNA
tctggctccccgtggcgtgt

SEQ ID NO: 4999 - RNA, 20 nt, synthetic construct
  source 1..20: mol_type = other RNA
tctggcttcccacctcagat

SEQ ID NO: 5000 - RNA, 20 nt, synthetic construct
  source 1..20: mol_type = other RNA
tctgggggccgcgatctccc

SEQ ID NO: 5001 - RNA, 20 nt, synthetic construct
  source 1..20: mol_type = other RNA
tctggtggcttgcgggggtt

SEQ ID NO: 5002 - RNA, 20 nt, synthetic construct
  source 1..20: mol_type = other RNA
tctggtgggaggggaggtgc

SEQ ID NO: 5003 - RNA, 20 nt, synthetic construct
  source 1..20: mol_type = other RNA
tctggttggagtaaagctcc

SEQ ID NO: 5004 - RNA, 20 nt, synthetic construct
  source 1..20: mol_type = other RNA
tctgtcacaaggccgcgaga

SEQ ID NO: 5005 - RNA, 20 nt, synthetic construct
  source 1..20: mol_type = other RNA
tctgtcggacccttaccttg

SEQ ID NO: 5006 - RNA, 20 nt, synthetic construct
  source 1..20: mol_type = other RNA
tcttaggaggatgctgccac

SEQ ID NO: 5007 - RNA, 20 nt, synthetic construct
  source 1..20: mol_type = other RNA
tcttcaaaggcagaaaaata

SEQ ID NO: 5008 - RNA, 20 nt, synthetic construct
  source 1..20: mol_type = other RNA
tcttcacattcccgacttac

SEQ ID NO: 5009 - RNA, 20 nt, synthetic construct
  source 1..20: mol_type = other RNA
tcttcaccccctttcctggg

SEQ ID NO: 5010 - RNA, 20 nt, synthetic construct
  source 1..20: mol_type = other RNA
tcttcctggacgccttccct

SEQ ID NO: 5011 - RNA, 20 nt, synthetic construct
  source 1..20: mol_type = other RNA
tcttcgacacctgattggct

SEQ ID NO: 5012 - RNA, 20 nt, synthetic construct
  source 1..20: mol_type = other RNA
tcttctctaggcggccccgg

SEQ ID NO: 5013 - RNA, 20 nt, synthetic construct
  source 1..20: mol_type = other RNA
tcttgctgccctccgctcga

SEQ ID NO: 5014 - RNA, 20 nt, synthetic construct
  source 1..20: mol_type = other RNA
tcttgggcgtcagtggtctt

SEQ ID NO: 5015 - RNA, 20 nt, synthetic construct
  source 1..20: mol_type = other RNA
tcttgtcgccgattggccgt

SEQ ID NO: 5016 - RNA, 20 nt, synthetic construct
  source 1..20: mol_type = other RNA
tcttgtgagaatatcttcaa

SEQ ID NO: 5017 - RNA, 20 nt, synthetic construct
  source 1..20: mol_type = other RNA
tctttccctctgcgtgtaag

SEQ ID NO: 5018 - RNA, 20 nt, synthetic construct
  source 1..20: mol_type = other RNA
tctttcctacactcctcttc

SEQ ID NO: 5019 - RNA, 20 nt, synthetic construct
  source 1..20: mol_type = other RNA
tctttctcttggatatggat

SEQ ID NO: 5020 - RNA, 20 nt, synthetic construct
  source 1..20: mol_type = other RNA
tcttttctgtcggaccctta

SEQ ID NO: 5021 - RNA, 20 nt, synthetic construct
  source 1..20: mol_type = other RNA
tgaaaacacaaatggcgtat

SEQ ID NO: 5022 - RNA, 20 nt, synthetic construct
  source 1..20: mol_type = other RNA
tgaaagggggagttgggtcg

SEQ ID NO: 5023 - RNA, 20 nt, synthetic construct
  source 1..20: mol_type = other RNA
tgaaatcggctctggcgcgg

SEQ ID NO: 5024 - RNA, 20 nt, synthetic construct
  source 1..20: mol_type = other RNA
tgaaccagggctctttccta

SEQ ID NO: 5025 - RNA, 20 nt, synthetic construct
  source 1..20: mol_type = other RNA
tgaagaggagtgtaggaaag

SEQ ID NO: 5026 - RNA, 20 nt, synthetic construct
  source 1..20: mol_type = other RNA
tgaagaggcgttgggggagg

SEQ ID NO: 5027 - RNA, 20 nt, synthetic construct
  source 1..20: mol_type = other RNA
tgaagatattctcacaagat

SEQ ID NO: 5028 - RNA, 20 nt, synthetic construct
  source 1..20: mol_type = other RNA
tgaagggcgagacaagcccg

SEQ ID NO: 5029 - RNA, 20 nt, synthetic construct
  source 1..20: mol_type = other RNA
tgaatgtgtagggttcgagc

SEQ ID NO: 5030 - RNA, 20 nt, synthetic construct
  source 1..20: mol_type = other RNA
tgaattctctttccctctgc

SEQ ID NO: 5031 - RNA, 20 nt, synthetic construct
  source 1..20: mol_type = other RNA
tgacagacaactctgatcgc

SEQ ID NO: 5032 - RNA, 20 nt, synthetic construct
  source 1..20: mol_type = other RNA
tgacaggagctttactccaa

SEQ ID NO: 5033 - RNA, 20 nt, synthetic construct
  source 1..20: mol_type = other RNA
tgacccaggaaaaacatgaa

SEQ ID NO: 5034 - RNA, 20 nt, synthetic construct
  source 1..20: mol_type = other RNA
tgaccctcccctcccgccgc

SEQ ID NO: 5035 - RNA, 20 nt, synthetic construct
  source 1..20: mol_type = other RNA
tgacccttccctcccctggg

SEQ ID NO: 5036 - RNA, 20 nt, synthetic construct
  source 1..20: mol_type = other RNA
tgaccgcacggggattccca

SEQ ID NO: 5037 - RNA, 20 nt, synthetic construct
  source 1..20: mol_type = other RNA
tgacgcccaagaagtgagac

SEQ ID NO: 5038 - RNA, 20 nt, synthetic construct
  source 1..20: mol_type = other RNA
tgactgcagcatccatatcc

SEQ ID NO: 5039 - RNA, 20 nt, synthetic construct
  source 1..20: mol_type = other RNA
tgagaagtggcagcatcctc

SEQ ID NO: 5040 - RNA, 20 nt, synthetic construct
  source 1..20: mol_type = other RNA
tgagaatatcttcaaaggca

SEQ ID NO: 5041 - RNA, 20 nt, synthetic construct
  source 1..20: mol_type = other RNA
tgagacaagcaaggactcta

SEQ ID NO: 5042 - RNA, 20 nt, synthetic construct
  source 1..20: mol_type = other RNA
tgagactcgagccagtagca

SEQ ID NO: 5043 - RNA, 20 nt, synthetic construct
  source 1..20: mol_type = other RNA
tgagagggaaagttaaactg

SEQ ID NO: 5044 - RNA, 20 nt, synthetic construct
  source 1..20: mol_type = other RNA
tgagatagcctcgttgaatg

SEQ ID NO: 5045 - RNA, 20 nt, synthetic construct
  source 1..20: mol_type = other RNA
tgagccagattgtgtcgttt

SEQ ID NO: 5046 - RNA, 20 nt, synthetic construct
  source 1..20: mol_type = other RNA
tgagcgaaaccactgcgcgg

SEQ ID NO: 5047 - RNA, 20 nt, synthetic construct
  source 1..20: mol_type = other RNA
tgaggagaggcctcttgctg

SEQ ID NO: 5048 - RNA, 20 nt, synthetic construct
  source 1..20: mol_type = other RNA
tgaggagccggagcgccgaa

SEQ ID NO: 5049 - RNA, 20 nt, synthetic construct
  source 1..20: mol_type = other RNA
tgaggtgggaagccagaaaa

SEQ ID NO: 5050 - RNA, 20 nt, synthetic construct
  source 1..20: mol_type = other RNA
tgaggtgggggtggggggca

SEQ ID NO: 5051 - RNA, 20 nt, synthetic construct
  source 1..20: mol_type = other RNA
tgaggttcggtctcttttct

SEQ ID NO: 5052 - RNA, 20 nt, synthetic construct
  source 1..20: mol_type = other RNA
tgagtctctgagcgcaggcg

SEQ ID NO: 5053 - RNA, 20 nt, synthetic construct
  source 1..20: mol_type = other RNA
tgatcgctctgggggccgcg

SEQ ID NO: 5054 - RNA, 20 nt, synthetic construct
  source 1..20: mol_type = other RNA
tgattctatagagtccttgc

SEQ ID NO: 5055 - RNA, 20 nt, synthetic construct
  source 1..20: mol_type = other RNA
tgattggcggcgagtgggcc

SEQ ID NO: 5056 - RNA, 20 nt, synthetic construct
  source 1..20: mol_type = other RNA
tgattggctgtcgaagctgt

SEQ ID NO: 5057 - RNA, 20 nt, synthetic construct
  source 1..20: mol_type = other RNA
tgcaacaccccattttccca

SEQ ID NO: 5058 - RNA, 20 nt, synthetic construct
  source 1..20: mol_type = other RNA
tgcaacggtgtgtgcaaggc

SEQ ID NO: 5059 - RNA, 20 nt, synthetic construct
  source 1..20: mol_type = other RNA
tgcaaggcggcgaggggggt

SEQ ID NO: 5060 - RNA, 20 nt, synthetic construct
  source 1..20: mol_type = other RNA
tgcacacaccgttgcaacac

SEQ ID NO: 5061 - RNA, 20 nt, synthetic construct
  source 1..20: mol_type = other RNA
tgcagcatccatatccaaga

SEQ ID NO: 5062 - RNA, 20 nt, synthetic construct
  source 1..20: mol_type = other RNA
tgcatccagccacccctttc

SEQ ID NO: 5063 - RNA, 20 nt, synthetic construct
  source 1..20: mol_type = other RNA
tgccacagcgtgtctgagat

SEQ ID NO: 5064 - RNA, 20 nt, synthetic construct
  source 1..20: mol_type = other RNA
tgccacgttgcgcaggggcg

SEQ ID NO: 5065 - RNA, 20 nt, synthetic construct
  source 1..20: mol_type = other RNA
tgccacttctcacccccctc

SEQ ID NO: 5066 - RNA, 20 nt, synthetic construct
  source 1..20: mol_type = other RNA
tgccccccacccccacctca

SEQ ID NO: 5067 - RNA, 20 nt, synthetic construct
  source 1..20: mol_type = other RNA
tgccccctgggtggggcggg

SEQ ID NO: 5068 - RNA, 20 nt, synthetic construct
  source 1..20: mol_type = other RNA
tgcccctggcgccggcgctg

SEQ ID NO: 5069 - RNA, 20 nt, synthetic construct
  source 1..20: mol_type = other RNA
tgcccgagcggaaacgccac

SEQ ID NO: 5070 - RNA, 20 nt, synthetic construct
  source 1..20: mol_type = other RNA
tgccctccgctcgaaataca

SEQ ID NO: 5071 - RNA, 20 nt, synthetic construct
  source 1..20: mol_type = other RNA
tgccggcccccctctttccc

SEQ ID NO: 5072 - RNA, 20 nt, synthetic construct
  source 1..20: mol_type = other RNA
tgccggccgagacttctgga

SEQ ID NO: 5073 - RNA, 20 nt, synthetic construct
  source 1..20: mol_type = other RNA
tgcctactccacgtttacct

SEQ ID NO: 5074 - RNA, 20 nt, synthetic construct
  source 1..20: mol_type = other RNA
tgcctgtagcaggtcgggct

SEQ ID NO: 5075 - RNA, 20 nt, synthetic construct
  source 1..20: mol_type = other RNA
tgcctgtgtatttcgagcgg

SEQ ID NO: 5076 - RNA, 20 nt, synthetic construct
  source 1..20: mol_type = other RNA
tgccttgggcgtggagaacg

SEQ ID NO: 5077 - RNA, 20 nt, synthetic construct
  source 1..20: mol_type = other RNA
tgcctttcccgtgggaagtc

SEQ ID NO: 5078 - RNA, 20 nt, synthetic construct
  source 1..20: mol_type = other RNA
tgcctttgaagatattctca

SEQ ID NO: 5079 - RNA, 20 nt, synthetic construct
  source 1..20: mol_type = other RNA
tgcctttgggaagcagccat

SEQ ID NO: 5080 - RNA, 20 nt, synthetic construct
  source 1..20: mol_type = other RNA
tgcgagagcaatggctccgt

SEQ ID NO: 5081 - RNA, 20 nt, synthetic construct
  source 1..20: mol_type = other RNA
tgcgatttacctacttgaac

SEQ ID NO: 5082 - RNA, 20 nt, synthetic construct
  source 1..20: mol_type = other RNA
tgcgcaacgtggcaggaagc

SEQ ID NO: 5083 - RNA, 20 nt, synthetic construct
  source 1..20: mol_type = other RNA
tgcgcaggggcgcggggcca

SEQ ID NO: 5084 - RNA, 20 nt, synthetic construct
  source 1..20: mol_type = other RNA
tgcgctcagagactcacgca

SEQ ID NO: 5085 - RNA, 20 nt, synthetic construct
  source 1..20: mol_type = other RNA
tgcggcaaccggagggggag

SEQ ID NO: 5086 - RNA, 20 nt, synthetic construct
  source 1..20: mol_type = other RNA
tgcggcgctcggcctcgggg

SEQ ID NO: 5087 - RNA, 20 nt, synthetic construct
  source 1..20: mol_type = other RNA
tgcggcgggaggggagggtc

SEQ ID NO: 5088 - RNA, 20 nt, synthetic construct
  source 1..20: mol_type = other RNA
tgcggggcggtgggcggaga

SEQ ID NO: 5089 - RNA, 20 nt, synthetic construct
  source 1..20: mol_type = other RNA
tgcgggggttgcctttcccg

SEQ ID NO: 5090 - RNA, 20 nt, synthetic construct
  source 1..20: mol_type = other RNA
tgcggtacactggggggatg

SEQ ID NO: 5091 - RNA, 20 nt, synthetic construct
  source 1..20: mol_type = other RNA
tgcggtcagtggcgtttccg

SEQ ID NO: 5092 - RNA, 20 nt, synthetic construct
  source 1..20: mol_type = other RNA
tgcgtactcccgacggcgta

SEQ ID NO: 5093 - RNA, 20 nt, synthetic construct
  source 1..20: mol_type = other RNA
tgcgtgagtctctgagcgca

SEQ ID NO: 5094 - RNA, 20 nt, synthetic construct
  source 1..20: mol_type = other RNA
tgcgtgtaagtcgggaatgt

SEQ ID NO: 5095 - RNA, 20 nt, synthetic construct
  source 1..20: mol_type = other RNA
tgctaattgattctatagag

SEQ ID NO: 5096 - RNA, 20 nt, synthetic construct
  source 1..20: mol_type = other RNA
tgctacaggcactcgtgggg

SEQ ID NO: 5097 - RNA, 20 nt, synthetic construct
  source 1..20: mol_type = other RNA
tgctactggctcgagtctca

SEQ ID NO: 5098 - RNA, 20 nt, synthetic construct
  source 1..20: mol_type = other RNA
tgctcgaaaccggacggagc

SEQ ID NO: 5099 - RNA, 20 nt, synthetic construct
  source 1..20: mol_type = other RNA
tgctctcgcagagggaggag

SEQ ID NO: 5100 - RNA, 20 nt, synthetic construct
  source 1..20: mol_type = other RNA
tgctgccacttctcaccccc

SEQ ID NO: 5101 - RNA, 20 nt, synthetic construct
  source 1..20: mol_type = other RNA
tgctgccctccgctcgaaat

SEQ ID NO: 5102 - RNA, 20 nt, synthetic construct
  source 1..20: mol_type = other RNA
tgcttcccaaaggcattacc

SEQ ID NO: 5103 - RNA, 20 nt, synthetic construct
  source 1..20: mol_type = other RNA
tgcttcggcgctccggctcc

SEQ ID NO: 5104 - RNA, 20 nt, synthetic construct
  source 1..20: mol_type = other RNA
tgcttgtctcacttcttggg

SEQ ID NO: 5105 - RNA, 20 nt, synthetic construct
  source 1..20: mol_type = other RNA
tgcttgtcttcgacacctga

SEQ ID NO: 5106 - RNA, 20 nt, synthetic construct
  source 1..20: mol_type = other RNA
tggacgccttccctctcgtt

SEQ ID NO: 5107 - RNA, 20 nt, synthetic construct
  source 1..20: mol_type = other RNA
tggagaacgatcttgtgaga

SEQ ID NO: 5108 - RNA, 20 nt, synthetic construct
  source 1..20: mol_type = other RNA
tggagtaaagctcctgtcag

SEQ ID NO: 5109 - RNA, 20 nt, synthetic construct
  source 1..20: mol_type = other RNA
tggagtaggcagttcccagg

SEQ ID NO: 5110 - RNA, 20 nt, synthetic construct
  source 1..20: mol_type = other RNA
tggagttgagccagattgtg

SEQ ID NO: 5111 - RNA, 20 nt, synthetic construct
  source 1..20: mol_type = other RNA
tggatgcaggcgggagggag

SEQ ID NO: 5112 - RNA, 20 nt, synthetic construct
  source 1..20: mol_type = other RNA
tggcacacgccacggggagc

SEQ ID NO: 5113 - RNA, 20 nt, synthetic construct
  source 1..20: mol_type = other RNA
tggcagcatcctcctaagag

SEQ ID NO: 5114 - RNA, 20 nt, synthetic construct
  source 1..20: mol_type = other RNA
tggcaggaagcgcgcgctgg

SEQ ID NO: 5115 - RNA, 20 nt, synthetic construct
  source 1..20: mol_type = other RNA
tggcccactcgccgccaatc

SEQ ID NO: 5116 - RNA, 20 nt, synthetic construct
  source 1..20: mol_type = other RNA
tggccccgcgcccctgcgca

SEQ ID NO: 5117 - RNA, 20 nt, synthetic construct
  source 1..20: mol_type = other RNA
tggcccgtacccgtgaggtg

SEQ ID NO: 5118 - RNA, 20 nt, synthetic construct
  source 1..20: mol_type = other RNA
tggccctccccaagctctta

SEQ ID NO: 5119 - RNA, 20 nt, synthetic construct
  source 1..20: mol_type = other RNA
tggccgggaatggcccgtac

SEQ ID NO: 5120 - RNA, 20 nt, synthetic construct
  source 1..20: mol_type = other RNA
tggccgtttctcctcccgcc

SEQ ID NO: 5121 - RNA, 20 nt, synthetic construct
  source 1..20: mol_type = other RNA
tggcgaaggtaatgcctttg

SEQ ID NO: 5122 - RNA, 20 nt, synthetic construct
  source 1..20: mol_type = other RNA
tggcgccgcgttgggcctaa

SEQ ID NO: 5123 - RNA, 20 nt, synthetic construct
  source 1..20: mol_type = other RNA
tggcgccggcgctgggaatc

SEQ ID NO: 5124 - RNA, 20 nt, synthetic construct
  source 1..20: mol_type = other RNA
tggcgcgggcgtcctcccac

SEQ ID NO: 5125 - RNA, 20 nt, synthetic construct
  source 1..20: mol_type = other RNA
tggcggactggcgggactgg

SEQ ID NO: 5126 - RNA, 20 nt, synthetic construct
  source 1..20: mol_type = other RNA
tggcggcgagtgggccaatg

SEQ ID NO: 5127 - RNA, 20 nt, synthetic construct
  source 1..20: mol_type = other RNA
tggcgggactggggctgcgt

SEQ ID NO: 5128 - RNA, 20 nt, synthetic construct
  source 1..20: mol_type = other RNA
tggcggggaggcgggcgttg

SEQ ID NO: 5129 - RNA, 20 nt, synthetic construct
  source 1..20: mol_type = other RNA
tggcgtattctggttggagt

SEQ ID NO: 5130 - RNA, 20 nt, synthetic construct
  source 1..20: mol_type = other RNA
tggcgtgtgccacagcgtgt

SEQ ID NO: 5131 - RNA, 20 nt, synthetic construct
  source 1..20: mol_type = other RNA
tggcgtttccgctcgggcag

SEQ ID NO: 5132 - RNA, 20 nt, synthetic construct
  source 1..20: mol_type = other RNA
tggctaggggggccgtctgg

SEQ ID NO: 5133 - RNA, 20 nt, synthetic construct
  source 1..20: mol_type = other RNA
tggctcaactccaggctcga

SEQ ID NO: 5134 - RNA, 20 nt, synthetic construct
  source 1..20: mol_type = other RNA
tggctccccgtggcgtgtgc

SEQ ID NO: 5135 - RNA, 20 nt, synthetic construct
  source 1..20: mol_type = other RNA
tggctccgtccggtttcgag

SEQ ID NO: 5136 - RNA, 20 nt, synthetic construct
  source 1..20: mol_type = other RNA
tggctcgagtctcacatgag

SEQ ID NO: 5137 - RNA, 20 nt, synthetic construct
  source 1..20: mol_type = other RNA
tggctcgctccgcctttctg

SEQ ID NO: 5138 - RNA, 20 nt, synthetic construct
  source 1..20: mol_type = other RNA
tggctgcttcccaaaggcat

SEQ ID NO: 5139 - RNA, 20 nt, synthetic construct
  source 1..20: mol_type = other RNA
tggctggatgcaggcgggag

SEQ ID NO: 5140 - RNA, 20 nt, synthetic construct
  source 1..20: mol_type = other RNA
tggctgtcgaagctgtggga

SEQ ID NO: 5141 - RNA, 20 nt, synthetic construct
  source 1..20: mol_type = other RNA
tggcttcccacctcagatgg

SEQ ID NO: 5142 - RNA, 20 nt, synthetic construct
  source 1..20: mol_type = other RNA
tggcttgcgggggttgcctt

SEQ ID NO: 5143 - RNA, 20 nt, synthetic construct
  source 1..20: mol_type = other RNA
tgggaaaatggggtgttgca

SEQ ID NO: 5144 - RNA, 20 nt, synthetic construct
  source 1..20: mol_type = other RNA
tgggaaagccccttctatgc

SEQ ID NO: 5145 - RNA, 20 nt, synthetic construct
  source 1..20: mol_type = other RNA
tgggaactgcctactccacg

SEQ ID NO: 5146 - RNA, 20 nt, synthetic construct
  source 1..20: mol_type = other RNA
tgggaagcagccatctgagg

SEQ ID NO: 5147 - RNA, 20 nt, synthetic construct
  source 1..20: mol_type = other RNA
tgggaagccagaaaacgaga

SEQ ID NO: 5148 - RNA, 20 nt, synthetic construct
  source 1..20: mol_type = other RNA
tgggaagtcgggaacataat

SEQ ID NO: 5149 - RNA, 20 nt, synthetic construct
  source 1..20: mol_type = other RNA
tgggaatccccgtgcggtca

SEQ ID NO: 5150 - RNA, 20 nt, synthetic construct
  source 1..20: mol_type = other RNA
tgggacaaggtaagggtccg

SEQ ID NO: 5151 - RNA, 20 nt, synthetic construct
  source 1..20: mol_type = other RNA
tgggaccgggcccttgctac

SEQ ID NO: 5152 - RNA, 20 nt, synthetic construct
  source 1..20: mol_type = other RNA
tgggaggacgcccgcgccag

SEQ ID NO: 5153 - RNA, 20 nt, synthetic construct
  source 1..20: mol_type = other RNA
tgggagggaaaggggtggct

SEQ ID NO: 5154 - RNA, 20 nt, synthetic construct
  source 1..20: mol_type = other RNA
tgggaggggaggtgcggtac

SEQ ID NO: 5155 - RNA, 20 nt, synthetic construct
  source 1..20: mol_type = other RNA
tgggccaatgggtgcggggc

SEQ ID NO: 5156 - RNA, 20 nt, synthetic construct
  source 1..20: mol_type = other RNA
tgggcctaactcgagtcctg

SEQ ID NO: 5157 - RNA, 20 nt, synthetic construct
  source 1..20: mol_type = other RNA
tgggcctggccctccccaag

SEQ ID NO: 5158 - RNA, 20 nt, synthetic construct
  source 1..20: mol_type = other RNA
tgggcggagaggccaatggc

SEQ ID NO: 5159 - RNA, 20 nt, synthetic construct
  source 1..20: mol_type = other RNA
tgggcgtcagtggtctttct

SEQ ID NO: 5160 - RNA, 20 nt, synthetic construct
  source 1..20: mol_type = other RNA
tgggcgtggagaacgatctt

SEQ ID NO: 5161 - RNA, 20 nt, synthetic construct
  source 1..20: mol_type = other RNA
tggggagggccaggcccacg

SEQ ID NO: 5162 - RNA, 20 nt, synthetic construct
  source 1..20: mol_type = other RNA
tggggcccgatcgtgaggtt

SEQ ID NO: 5163 - RNA, 20 nt, synthetic construct
  source 1..20: mol_type = other RNA
tggggcgggtaggtaggtgg

SEQ ID NO: 5164 - RNA, 20 nt, synthetic construct
  source 1..20: mol_type = other RNA
tggggctgcgtgagtctctg

SEQ ID NO: 5165 - RNA, 20 nt, synthetic construct
  source 1..20: mol_type = other RNA
tgggggaggagcgggggtcg

SEQ ID NO: 5166 - RNA, 20 nt, synthetic construct
  source 1..20: mol_type = other RNA
tgggggaggggaagcgtcct

SEQ ID NO: 5167 - RNA, 20 nt, synthetic construct
  source 1..20: mol_type = other RNA
tgggggccgcgatctcccct

SEQ ID NO: 5168 - RNA, 20 nt, synthetic construct
  source 1..20: mol_type = other RNA
tggggggatgggtggctagg

SEQ ID NO: 5169 - RNA, 20 nt, synthetic construct
  source 1..20: mol_type = other RNA
tggggggcagaaaggcggag

SEQ ID NO: 5170 - RNA, 20 nt, synthetic construct
  source 1..20: mol_type = other RNA
tgggggtggcgaaggtaatg

SEQ ID NO: 5171 - RNA, 20 nt, synthetic construct
  source 1..20: mol_type = other RNA
tgggggtgggggaggagcgg

SEQ ID NO: 5172 - RNA, 20 nt, synthetic construct
  source 1..20: mol_type = other RNA
tgggggtggggggcagaaag

SEQ ID NO: 5173 - RNA, 20 nt, synthetic construct
  source 1..20: mol_type = other RNA
tggggtgtagagatgctggg

SEQ ID NO: 5174 - RNA, 20 nt, synthetic construct
  source 1..20: mol_type = other RNA
tggggtgttgcaacggtgtg

SEQ ID NO: 5175 - RNA, 20 nt, synthetic construct
  source 1..20: mol_type = other RNA
tgggtcaggacgcttcccct

SEQ ID NO: 5176 - RNA, 20 nt, synthetic construct
  source 1..20: mol_type = other RNA
tgggtcgcctagattagagg

SEQ ID NO: 5177 - RNA, 20 nt, synthetic construct
  source 1..20: mol_type = other RNA
tgggtcgtgggcctggccct

SEQ ID NO: 5178 - RNA, 20 nt, synthetic construct
  source 1..20: mol_type = other RNA
tgggtggctaggggggccgt

SEQ ID NO: 5179 - RNA, 20 nt, synthetic construct
  source 1..20: mol_type = other RNA
tgggtggggcgggtaggtag

SEQ ID NO: 5180 - RNA, 20 nt, synthetic construct
  source 1..20: mol_type = other RNA
tggtacggtcctccccgagg

SEQ ID NO: 5181 - RNA, 20 nt, synthetic construct
  source 1..20: mol_type = other RNA
tggtctttctcttggatatg

SEQ ID NO: 5182 - RNA, 20 nt, synthetic construct
  source 1..20: mol_type = other RNA
tggtggcttgcgggggttgc

SEQ ID NO: 5183 - RNA, 20 nt, synthetic construct
  source 1..20: mol_type = other RNA
tggtgggaggggaggtgcgg

SEQ ID NO: 5184 - RNA, 20 nt, synthetic construct
  source 1..20: mol_type = other RNA
tggtgggggtggcgaaggta

SEQ ID NO: 5185 - RNA, 20 nt, synthetic construct
  source 1..20: mol_type = other RNA
tggttcaagtaggtaaatcg

SEQ ID NO: 5186 - RNA, 20 nt, synthetic construct
  source 1..20: mol_type = other RNA
tggttggagtaaagctcctg

SEQ ID NO: 5187 - RNA, 20 nt, synthetic construct
  source 1..20: mol_type = other RNA
tggtttcgctcatgtgagac

SEQ ID NO: 5188 - RNA, 20 nt, synthetic construct
  source 1..20: mol_type = other RNA
tgtaagtcgggaatgtgaag

SEQ ID NO: 5189 - RNA, 20 nt, synthetic construct
  source 1..20: mol_type = other RNA
tgtaccgcacctcccctccc

SEQ ID NO: 5190 - RNA, 20 nt, synthetic construct
  source 1..20: mol_type = other RNA
tgtagagatgctgggtgtgc

SEQ ID NO: 5191 - RNA, 20 nt, synthetic construct
  source 1..20: mol_type = other RNA
tgtagcaggtcgggcttgtc

SEQ ID NO: 5192 - RNA, 20 nt, synthetic construct
  source 1..20: mol_type = other RNA
tgtaggaaagagccctggtt

SEQ ID NO: 5193 - RNA, 20 nt, synthetic construct
  source 1..20: mol_type = other RNA
tgtagggttcgagcctggag

SEQ ID NO: 5194 - RNA, 20 nt, synthetic construct
  source 1..20: mol_type = other RNA
tgtatttcgagcggagggca

SEQ ID NO: 5195 - RNA, 20 nt, synthetic construct
  source 1..20: mol_type = other RNA
tgtcacaaggccgcgagaac

SEQ ID NO: 5196 - RNA, 20 nt, synthetic construct
  source 1..20: mol_type = other RNA
tgtcagttacgccgtcggga

SEQ ID NO: 5197 - RNA, 20 nt, synthetic construct
  source 1..20: mol_type = other RNA
tgtcgaagacaagcaggcgg

SEQ ID NO: 5198 - RNA, 20 nt, synthetic construct
  source 1..20: mol_type = other RNA
tgtcgaagctgtgggaccgg

SEQ ID NO: 5199 - RNA, 20 nt, synthetic construct
  source 1..20: mol_type = other RNA
tgtcgccgattggccgtttc

SEQ ID NO: 5200 - RNA, 20 nt, synthetic construct
  source 1..20: mol_type = other RNA
tgtcggacccttaccttgtc

SEQ ID NO: 5201 - RNA, 20 nt, synthetic construct
  source 1..20: mol_type = other RNA
tgtcgttttacttgccttgg

SEQ ID NO: 5202 - RNA, 20 nt, synthetic construct
  source 1..20: mol_type = other RNA
tgtctcacttcttgggcgtc

SEQ ID NO: 5203 - RNA, 20 nt, synthetic construct
  source 1..20: mol_type = other RNA
tgtctcgcccttcaggcggt

SEQ ID NO: 5204 - RNA, 20 nt, synthetic construct
  source 1..20: mol_type = other RNA
tgtctgagatagcctcgttg

SEQ ID NO: 5205 - RNA, 20 nt, synthetic construct
  source 1..20: mol_type = other RNA
tgtctggccccgcgcccctg

SEQ ID NO: 5206 - RNA, 20 nt, synthetic construct
  source 1..20: mol_type = other RNA
tgtctgtcacaaggccgcga

SEQ ID NO: 5207 - RNA, 20 nt, synthetic construct
  source 1..20: mol_type = other RNA
tgtcttcgacacctgattgg

SEQ ID NO: 5208 - RNA, 20 nt, synthetic construct
  source 1..20: mol_type = other RNA
tgtgaaaacacaaatggcgt

SEQ ID NO: 5209 - RNA, 20 nt, synthetic construct
  source 1..20: mol_type = other RNA
tgtgaagaggagtgtaggaa

SEQ ID NO: 5210 - RNA, 20 nt, synthetic construct
  source 1..20: mol_type = other RNA
tgtgacagacaactctgatc

SEQ ID NO: 5211 - RNA, 20 nt, synthetic construct
  source 1..20: mol_type = other RNA
tgtgagaatatcttcaaagg

SEQ ID NO: 5212 - RNA, 20 nt, synthetic construct
  source 1..20: mol_type = other RNA
tgtgagactcgagccagtag

SEQ ID NO: 5213 - RNA, 20 nt, synthetic construct
  source 1..20: mol_type = other RNA
tgtgcaaggcggcgaggggg

SEQ ID NO: 5214 - RNA, 20 nt, synthetic construct
  source 1..20: mol_type = other RNA
tgtgccacagcgtgtctgag

SEQ ID NO: 5215 - RNA, 20 nt, synthetic construct
  source 1..20: mol_type = other RNA
tgtgcttcggcgctccggct

SEQ ID NO: 5216 - RNA, 20 nt, synthetic construct
  source 1..20: mol_type = other RNA
tgtggcacacgccacgggga

SEQ ID NO: 5217 - RNA, 20 nt, synthetic construct
  source 1..20: mol_type = other RNA
tgtgggaccgggcccttgct

SEQ ID NO: 5218 - RNA, 20 nt, synthetic construct
  source 1..20: mol_type = other RNA
tgtggtgggggtggcgaagg

SEQ ID NO: 5219 - RNA, 20 nt, synthetic construct
  source 1..20: mol_type = other RNA
tgtgtagggttcgagcctgg

SEQ ID NO: 5220 - RNA, 20 nt, synthetic construct
  source 1..20: mol_type = other RNA
tgtgtatttcgagcggaggg

SEQ ID NO: 5221 - RNA, 20 nt, synthetic construct
  source 1..20: mol_type = other RNA
tgtgtcgttttacttgcctt

SEQ ID NO: 5222 - RNA, 20 nt, synthetic construct
  source 1..20: mol_type = other RNA
tgtgtgaaaacacaaatggc

SEQ ID NO: 5223 - RNA, 20 nt, synthetic construct
  source 1..20: mol_type = other RNA
tgtgtgcaaggcggcgaggg

SEQ ID NO: 5224 - RNA, 20 nt, synthetic construct
  source 1..20: mol_type = other RNA
tgtgttggcggactggcggg

SEQ ID NO: 5225 - RNA, 20 nt, synthetic construct
  source 1..20: mol_type = other RNA
tgtgttttcacacacggcgg

SEQ ID NO: 5226 - RNA, 20 nt, synthetic construct
  source 1..20: mol_type = other RNA
tgttacgttgggagggaaag

SEQ ID NO: 5227 - RNA, 20 nt, synthetic construct
  source 1..20: mol_type = other RNA
tgttcccgacttcccacggg

SEQ ID NO: 5228 - RNA, 20 nt, synthetic construct
  source 1..20: mol_type = other RNA
tgttgcaacggtgtgtgcaa

SEQ ID NO: 5229 - RNA, 20 nt, synthetic construct
  source 1..20: mol_type = other RNA
tgttggcggactggcgggac

SEQ ID NO: 5230 - RNA, 20 nt, synthetic construct
  source 1..20: mol_type = other RNA
tgttgggaaagccccttcta

SEQ ID NO: 5231 - RNA, 20 nt, synthetic construct
  source 1..20: mol_type = other RNA
tgtttgttacgttgggaggg

SEQ ID NO: 5232 - RNA, 20 nt, synthetic construct
  source 1..20: mol_type = other RNA
tgttttcacacacggcggga

SEQ ID NO: 5233 - RNA, 20 nt, synthetic construct
  source 1..20: mol_type = other RNA
tgtttttcctgggtcaggac

SEQ ID NO: 5234 - RNA, 20 nt, synthetic construct
  source 1..20: mol_type = other RNA
ttaaactgttgggaaagccc

SEQ ID NO: 5235 - RNA, 20 nt, synthetic construct
  source 1..20: mol_type = other RNA
ttaactttccctctcatgcg

SEQ ID NO: 5236 - RNA, 20 nt, synthetic construct
  source 1..20: mol_type = other RNA
ttacacgcagagggaaagag

SEQ ID NO: 5237 - RNA, 20 nt, synthetic construct
  source 1..20: mol_type = other RNA
ttacccgccgcctgcttgtc

SEQ ID NO: 5238 - RNA, 20 nt, synthetic construct
  source 1..20: mol_type = other RNA
ttacctacttgaaccagggc

SEQ ID NO: 5239 - RNA, 20 nt, synthetic construct
  source 1..20: mol_type = other RNA
ttaccttcgccacccccacc

SEQ ID NO: 5240 - RNA, 20 nt, synthetic construct
  source 1..20: mol_type = other RNA
ttaccttgtcccaggcgctg

SEQ ID NO: 5241 - RNA, 20 nt, synthetic construct
  source 1..20: mol_type = other RNA
ttacctttcccttgaggaga

SEQ ID NO: 5242 - RNA, 20 nt, synthetic construct
  source 1..20: mol_type = other RNA
ttacgccgtcgggagtacgc

SEQ ID NO: 5243 - RNA, 20 nt, synthetic construct
  source 1..20: mol_type = other RNA
ttacggaggggagatcgcgg

SEQ ID NO: 5244 - RNA, 20 nt, synthetic construct
  source 1..20: mol_type = other RNA
ttacgttgggagggaaaggg

SEQ ID NO: 5245 - RNA, 20 nt, synthetic construct
  source 1..20: mol_type = other RNA
ttactccaaccagaatacgc

SEQ ID NO: 5246 - RNA, 20 nt, synthetic construct
  source 1..20: mol_type = other RNA
ttacttgccttgggcgtgga

SEQ ID NO: 5247 - RNA, 20 nt, synthetic construct
  source 1..20: mol_type = other RNA
ttagagggggatctctctcc

SEQ ID NO: 5248 - RNA, 20 nt, synthetic construct
  source 1..20: mol_type = other RNA
ttagcatagaaggggctttc

SEQ ID NO: 5249 - RNA, 20 nt, synthetic construct
  source 1..20: mol_type = other RNA
ttagcgactctcgcgttgcc

SEQ ID NO: 5250 - RNA, 20 nt, synthetic construct
  source 1..20: mol_type = other RNA
ttaggaggatgctgccactt

SEQ ID NO: 5251 - RNA, 20 nt, synthetic construct
  source 1..20: mol_type = other RNA
ttaggcccaacgcggcgcca

SEQ ID NO: 5252 - RNA, 20 nt, synthetic construct
  source 1..20: mol_type = other RNA
ttatgaattctctttccctc

SEQ ID NO: 5253 - RNA, 20 nt, synthetic construct
  source 1..20: mol_type = other RNA
ttatgttcccgacttcccac

SEQ ID NO: 5254 - RNA, 20 nt, synthetic construct
  source 1..20: mol_type = other RNA
ttcaaaggcagaaaaatatt

SEQ ID NO: 5255 - RNA, 20 nt, synthetic construct
  source 1..20: mol_type = other RNA
ttcaacgaggctatctcaga

SEQ ID NO: 5256 - RNA, 20 nt, synthetic construct
  source 1..20: mol_type = other RNA
ttcaagtaggtaaatcgcat

SEQ ID NO: 5257 - RNA, 20 nt, synthetic construct
  source 1..20: mol_type = other RNA
ttcacacacggcgggaggag

SEQ ID NO: 5258 - RNA, 20 nt, synthetic construct
  source 1..20: mol_type = other RNA
ttcacattcccgacttacac

SEQ ID NO: 5259 - RNA, 20 nt, synthetic construct
  source 1..20: mol_type = other RNA
ttcaccccctttcctgggaa

SEQ ID NO: 5260 - RNA, 20 nt, synthetic construct
  source 1..20: mol_type = other RNA
ttcactgaccctcccctccc

SEQ ID NO: 5261 - RNA, 20 nt, synthetic construct
  source 1..20: mol_type = other RNA
ttcaggcggtgggaacccgg

SEQ ID NO: 5262 - RNA, 20 nt, synthetic construct
  source 1..20: mol_type = other RNA
ttcataaagggaatattttt

SEQ ID NO: 5263 - RNA, 20 nt, synthetic construct
  source 1..20: mol_type = other RNA
ttcatgtttttcctgggtca

SEQ ID NO: 5264 - RNA, 20 nt, synthetic construct
  source 1..20: mol_type = other RNA
ttcccaaaggcattaccttc

SEQ ID NO: 5265 - RNA, 20 nt, synthetic construct
  source 1..20: mol_type = other RNA
ttcccaacagtttaactttc

SEQ ID NO: 5266 - RNA, 20 nt, synthetic construct
  source 1..20: mol_type = other RNA
ttcccaccgcctgaagggcg

SEQ ID NO: 5267 - RNA, 20 nt, synthetic construct
  source 1..20: mol_type = other RNA
ttcccacctcagatggctgc

SEQ ID NO: 5268 - RNA, 20 nt, synthetic construct
  source 1..20: mol_type = other RNA
ttcccacgggaaaggcaacc

SEQ ID NO: 5269 - RNA, 20 nt, synthetic construct
  source 1..20: mol_type = other RNA
ttcccaggaaagggggtgaa

SEQ ID NO: 5270 - RNA, 20 nt, synthetic construct
  source 1..20: mol_type = other RNA
ttcccagggagagagatccc

SEQ ID NO: 5271 - RNA, 20 nt, synthetic construct
  source 1..20: mol_type = other RNA
ttcccctcccccaacgcctc

SEQ ID NO: 5272 - RNA, 20 nt, synthetic construct
  source 1..20: mol_type = other RNA
ttcccgacttacacgcagag

SEQ ID NO: 5273 - RNA, 20 nt, synthetic construct
  source 1..20: mol_type = other RNA
ttcccgacttcccacgggaa

SEQ ID NO: 5274 - RNA, 20 nt, synthetic construct
  source 1..20: mol_type = other RNA
ttcccggccaggaaacgccg

SEQ ID NO: 5275 - RNA, 20 nt, synthetic construct
  source 1..20: mol_type = other RNA
ttcccgtgggaagtcgggaa

SEQ ID NO: 5276 - RNA, 20 nt, synthetic construct
  source 1..20: mol_type = other RNA
ttccctcccaacgtaacaaa

SEQ ID NO: 5277 - RNA, 20 nt, synthetic construct
  source 1..20: mol_type = other RNA
ttccctcccctggggcccga

SEQ ID NO: 5278 - RNA, 20 nt, synthetic construct
  source 1..20: mol_type = other RNA
ttccctctcatgcgatttac

SEQ ID NO: 5279 - RNA, 20 nt, synthetic construct
  source 1..20: mol_type = other RNA
ttccctctcgttttctggct

SEQ ID NO: 5280 - RNA, 20 nt, synthetic construct
  source 1..20: mol_type = other RNA
ttccctctgcgtgtaagtcg

SEQ ID NO: 5281 - RNA, 20 nt, synthetic construct
  source 1..20: mol_type = other RNA
ttcccttgaggagaggcctc

SEQ ID NO: 5282 - RNA, 20 nt, synthetic construct
  source 1..20: mol_type = other RNA
ttccctttatgaattctctt

SEQ ID NO: 5283 - RNA, 20 nt, synthetic construct
  source 1..20: mol_type = other RNA
ttccgctcccctacctagcc

SEQ ID NO: 5284 - RNA, 20 nt, synthetic construct
  source 1..20: mol_type = other RNA
ttccgctcccttctccctcc

SEQ ID NO: 5285 - RNA, 20 nt, synthetic construct
  source 1..20: mol_type = other RNA
ttccgctcgggcagcgggct

SEQ ID NO: 5286 - RNA, 20 nt, synthetic construct
  source 1..20: mol_type = other RNA
ttccgctgattggcggcgag

SEQ ID NO: 5287 - RNA, 20 nt, synthetic construct
  source 1..20: mol_type = other RNA
ttccggctagcctcttgtcg

SEQ ID NO: 5288 - RNA, 20 nt, synthetic construct
  source 1..20: mol_type = other RNA
ttcctacactcctcttcaca

SEQ ID NO: 5289 - RNA, 20 nt, synthetic construct
  source 1..20: mol_type = other RNA
ttcctgccacgttgcgcagg

SEQ ID NO: 5290 - RNA, 20 nt, synthetic construct
  source 1..20: mol_type = other RNA
ttcctggacgccttccctct

SEQ ID NO: 5291 - RNA, 20 nt, synthetic construct
  source 1..20: mol_type = other RNA
ttcctggccgggaatggccc

SEQ ID NO: 5292 - RNA, 20 nt, synthetic construct
  source 1..20: mol_type = other RNA
ttcctgggaactgcctactc

SEQ ID NO: 5293 - RNA, 20 nt, synthetic construct
  source 1..20: mol_type = other RNA
ttcctgggtcaggacgcttc

SEQ ID NO: 5294 - RNA, 20 nt, synthetic construct
  source 1..20: mol_type = other RNA
ttccttcgggggagtcggtt

SEQ ID NO: 5295 - RNA, 20 nt, synthetic construct
  source 1..20: mol_type = other RNA
ttcgacacctgattggctgt

SEQ ID NO: 5296 - RNA, 20 nt, synthetic construct
  source 1..20: mol_type = other RNA
ttcgacagccaatcaggtgt

SEQ ID NO: 5297 - RNA, 20 nt, synthetic construct
  source 1..20: mol_type = other RNA
ttcgagcattttccgctccc

SEQ ID NO: 5298 - RNA, 20 nt, synthetic construct
  source 1..20: mol_type = other RNA
ttcgagcctggagttgagcc

SEQ ID NO: 5299 - RNA, 20 nt, synthetic construct
  source 1..20: mol_type = other RNA
ttcgagcggagggcagcaag

SEQ ID NO: 5300 - RNA, 20 nt, synthetic construct
  source 1..20: mol_type = other RNA
ttcgccacccccaccacacg

SEQ ID NO: 5301 - RNA, 20 nt, synthetic construct
  source 1..20: mol_type = other RNA
ttcgctcatgtgagactcga

SEQ ID NO: 5302 - RNA, 20 nt, synthetic construct
  source 1..20: mol_type = other RNA
ttcggcgctccggctcctca

SEQ ID NO: 5303 - RNA, 20 nt, synthetic construct
  source 1..20: mol_type = other RNA
ttcgggggagtcggtttacc

SEQ ID NO: 5304 - RNA, 20 nt, synthetic construct
  source 1..20: mol_type = other RNA
ttcggtctcttttctgtcgg

SEQ ID NO: 5305 - RNA, 20 nt, synthetic construct
  source 1..20: mol_type = other RNA
ttctatagagtccttgcttg

SEQ ID NO: 5306 - RNA, 20 nt, synthetic construct
  source 1..20: mol_type = other RNA
ttctatgctaattgattcta

SEQ ID NO: 5307 - RNA, 20 nt, synthetic construct
  source 1..20: mol_type = other RNA
ttctcacaagatcgttctcc

SEQ ID NO: 5308 - RNA, 20 nt, synthetic construct
  source 1..20: mol_type = other RNA
ttctcacccccctcgccgcc

SEQ ID NO: 5309 - RNA, 20 nt, synthetic construct
  source 1..20: mol_type = other RNA
ttctccacgcccaaggcaag

SEQ ID NO: 5310 - RNA, 20 nt, synthetic construct
  source 1..20: mol_type = other RNA
ttctccctccccctccggtt

SEQ ID NO: 5311 - RNA, 20 nt, synthetic construct
  source 1..20: mol_type = other RNA
ttctcctcccgccgtgtgtg

SEQ ID NO: 5312 - RNA, 20 nt, synthetic construct
  source 1..20: mol_type = other RNA
ttctcgcggccttgtgacag

SEQ ID NO: 5313 - RNA, 20 nt, synthetic construct
  source 1..20: mol_type = other RNA
ttctctaggcggccccggcg

SEQ ID NO: 5314 - RNA, 20 nt, synthetic construct
  source 1..20: mol_type = other RNA
ttctctccccgatcccccac

SEQ ID NO: 5315 - RNA, 20 nt, synthetic construct
  source 1..20: mol_type = other RNA
ttctctggctccccgtggcg

SEQ ID NO: 5316 - RNA, 20 nt, synthetic construct
  source 1..20: mol_type = other RNA
ttctctttccctctgcgtgt

SEQ ID NO: 5317 - RNA, 20 nt, synthetic construct
  source 1..20: mol_type = other RNA
ttctgccccccacccccacc

SEQ ID NO: 5318 - RNA, 20 nt, synthetic construct
  source 1..20: mol_type = other RNA
ttctgcctttgaagatattc

SEQ ID NO: 5319 - RNA, 20 nt, synthetic construct
  source 1..20: mol_type = other RNA
ttctggatggcggcggccgc

SEQ ID NO: 5320 - RNA, 20 nt, synthetic construct
  source 1..20: mol_type = other RNA
ttctggcttcccacctcaga

SEQ ID NO: 5321 - RNA, 20 nt, synthetic construct
  source 1..20: mol_type = other RNA
ttctggttggagtaaagctc

SEQ ID NO: 5322 - RNA, 20 nt, synthetic construct
  source 1..20: mol_type = other RNA
ttctgtcggacccttacctt

SEQ ID NO: 5323 - RNA, 20 nt, synthetic construct
  source 1..20: mol_type = other RNA
ttcttgggcgtcagtggtct

SEQ ID NO: 5324 - RNA, 20 nt, synthetic construct
  source 1..20: mol_type = other RNA
ttgaaccagggctctttcct

SEQ ID NO: 5325 - RNA, 20 nt, synthetic construct
  source 1..20: mol_type = other RNA
ttgaagatattctcacaaga

SEQ ID NO: 5326 - RNA, 20 nt, synthetic construct
  source 1..20: mol_type = other RNA
ttgaatgtgtagggttcgag

SEQ ID NO: 5327 - RNA, 20 nt, synthetic construct
  source 1..20: mol_type = other RNA
ttgagccagattgtgtcgtt

SEQ ID NO: 5328 - RNA, 20 nt, synthetic construct
  source 1..20: mol_type = other RNA
ttgaggagaggcctcttgct

SEQ ID NO: 5329 - RNA, 20 nt, synthetic construct
  source 1..20: mol_type = other RNA
ttgattctatagagtccttg

SEQ ID NO: 5330 - RNA, 20 nt, synthetic construct
  source 1..20: mol_type = other RNA
ttgcaacaccccattttccc

SEQ ID NO: 5331 - RNA, 20 nt, synthetic construct
  source 1..20: mol_type = other RNA
ttgcaacggtgtgtgcaagg

SEQ ID NO: 5332 - RNA, 20 nt, synthetic construct
  source 1..20: mol_type = other RNA
ttgcacacaccgttgcaaca

SEQ ID NO: 5333 - RNA, 20 nt, synthetic construct
  source 1..20: mol_type = other RNA
ttgccccctgggtggggcgg

SEQ ID NO: 5334 - RNA, 20 nt, synthetic construct
  source 1..20: mol_type = other RNA
ttgccttgggcgtggagaac

SEQ ID NO: 5335 - RNA, 20 nt, synthetic construct
  source 1..20: mol_type = other RNA
ttgcctttcccgtgggaagt

SEQ ID NO: 5336 - RNA, 20 nt, synthetic construct
  source 1..20: mol_type = other RNA
ttgcgcaggggcgcggggcc

SEQ ID NO: 5337 - RNA, 20 nt, synthetic construct
  source 1..20: mol_type = other RNA
ttgcgggggttgcctttccc

SEQ ID NO: 5338 - RNA, 20 nt, synthetic construct
  source 1..20: mol_type = other RNA
ttgctactggctcgagtctc

SEQ ID NO: 5339 - RNA, 20 nt, synthetic construct
  source 1..20: mol_type = other RNA
ttgctctcgcagagggagga

SEQ ID NO: 5340 - RNA, 20 nt, synthetic construct
  source 1..20: mol_type = other RNA
ttgctgccctccgctcgaaa

SEQ ID NO: 5341 - RNA, 20 nt, synthetic construct
  source 1..20: mol_type = other RNA
ttgcttgtctcacttcttgg

SEQ ID NO: 5342 - RNA, 20 nt, synthetic construct
  source 1..20: mol_type = other RNA
ttggagtaaagctcctgtca

SEQ ID NO: 5343 - RNA, 20 nt, synthetic construct
  source 1..20: mol_type = other RNA
ttggcccactcgccgccaat

SEQ ID NO: 5344 - RNA, 20 nt, synthetic construct
  source 1..20: mol_type = other RNA
ttggccgtttctcctcccgc

SEQ ID NO: 5345 - RNA, 20 nt, synthetic construct
  source 1..20: mol_type = other RNA
ttggcctctccgcccaccgc

SEQ ID NO: 5346 - RNA, 20 nt, synthetic construct
  source 1..20: mol_type = other RNA
ttggcggactggcgggactg

SEQ ID NO: 5347 - RNA, 20 nt, synthetic construct
  source 1..20: mol_type = other RNA
ttggcggcgagtgggccaat

SEQ ID NO: 5348 - RNA, 20 nt, synthetic construct
  source 1..20: mol_type = other RNA
ttggctcgctccgcctttct

SEQ ID NO: 5349 - RNA, 20 nt, synthetic construct
  source 1..20: mol_type = other RNA
ttggctgtcgaagctgtggg

SEQ ID NO: 5350 - RNA, 20 nt, synthetic construct
  source 1..20: mol_type = other RNA
ttgggaaagccccttctatg

SEQ ID NO: 5351 - RNA, 20 nt, synthetic construct
  source 1..20: mol_type = other RNA
ttgggaagcagccatctgag

SEQ ID NO: 5352 - RNA, 20 nt, synthetic construct
  source 1..20: mol_type = other RNA
ttgggagggaaaggggtggc

SEQ ID NO: 5353 - RNA, 20 nt, synthetic construct
  source 1..20: mol_type = other RNA
ttgggcctaactcgagtcct

SEQ ID NO: 5354 - RNA, 20 nt, synthetic construct
  source 1..20: mol_type = other RNA
ttgggcgtcagtggtctttc

SEQ ID NO: 5355 - RNA, 20 nt, synthetic construct
  source 1..20: mol_type = other RNA
ttgggcgtggagaacgatct

SEQ ID NO: 5356 - RNA, 20 nt, synthetic construct
  source 1..20: mol_type = other RNA
ttggggagggccaggcccac

SEQ ID NO: 5357 - RNA, 20 nt, synthetic construct
  source 1..20: mol_type = other RNA
ttgggggaggggaagcgtcc

SEQ ID NO: 5358 - RNA, 20 nt, synthetic construct
  source 1..20: mol_type = other RNA
ttgggtcgcctagattagag

SEQ ID NO: 5359 - RNA, 20 nt, synthetic construct
  source 1..20: mol_type = other RNA
ttgggtcgtgggcctggccc

SEQ ID NO: 5360 - RNA, 20 nt, synthetic construct
  source 1..20: mol_type = other RNA
ttggtacggtcctccccgag

SEQ ID NO: 5361 - RNA, 20 nt, synthetic construct
  source 1..20: mol_type = other RNA
ttgtcccaggcgctgccggg

SEQ ID NO: 5362 - RNA, 20 nt, synthetic construct
  source 1..20: mol_type = other RNA
ttgtcgccgattggccgttt

SEQ ID NO: 5363 - RNA, 20 nt, synthetic construct
  source 1..20: mol_type = other RNA
ttgtctcacttcttgggcgt

SEQ ID NO: 5364 - RNA, 20 nt, synthetic construct
  source 1..20: mol_type = other RNA
ttgtctcgcccttcaggcgg

SEQ ID NO: 5365 - RNA, 20 nt, synthetic construct
  source 1..20: mol_type = other RNA
ttgtctgtcacaaggccgcg

SEQ ID NO: 5366 - RNA, 20 nt, synthetic construct
  source 1..20: mol_type = other RNA
ttgtcttcgacacctgattg

SEQ ID NO: 5367 - RNA, 20 nt, synthetic construct
  source 1..20: mol_type = other RNA
ttgtgacagacaactctgat

SEQ ID NO: 5368 - RNA, 20 nt, synthetic construct
  source 1..20: mol_type = other RNA
ttgtgagaatatcttcaaag

SEQ ID NO: 5369 - RNA, 20 nt, synthetic construct
  source 1..20: mol_type = other RNA
ttgtgtcgttttacttgcct

SEQ ID NO: 5370 - RNA, 20 nt, synthetic construct
  source 1..20: mol_type = other RNA
ttgtgttttcacacacggcg

SEQ ID NO: 5371 - RNA, 20 nt, synthetic construct
  source 1..20: mol_type = other RNA
ttgttacgttgggagggaaa

SEQ ID NO: 5372 - RNA, 20 nt, synthetic construct
  source 1..20: mol_type = other RNA
tttaactttccctctcatgc

SEQ ID NO: 5373 - RNA, 20 nt, synthetic construct
  source 1..20: mol_type = other RNA
tttacccgccgcctgcttgt

SEQ ID NO: 5374 - RNA, 20 nt, synthetic construct
  source 1..20: mol_type = other RNA
tttacctacttgaaccaggg

SEQ ID NO: 5375 - RNA, 20 nt, synthetic construct
  source 1..20: mol_type = other RNA
tttacctttcccttgaggag

SEQ ID NO: 5376 - RNA, 20 nt, synthetic construct
  source 1..20: mol_type = other RNA
tttactccaaccagaatacg

SEQ ID NO: 5377 - RNA, 20 nt, synthetic construct
  source 1..20: mol_type = other RNA
tttacttgccttgggcgtgg

SEQ ID NO: 5378 - RNA, 20 nt, synthetic construct
  source 1..20: mol_type = other RNA
tttatgaattctctttccct

SEQ ID NO: 5379 - RNA, 20 nt, synthetic construct
  source 1..20: mol_type = other RNA
tttcacacacggcgggagga

SEQ ID NO: 5380 - RNA, 20 nt, synthetic construct
  source 1..20: mol_type = other RNA
tttcactgaccctcccctcc

SEQ ID NO: 5381 - RNA, 20 nt, synthetic construct
  source 1..20: mol_type = other RNA
tttcatgtttttcctgggtc

SEQ ID NO: 5382 - RNA, 20 nt, synthetic construct
  source 1..20: mol_type = other RNA
tttcccaacagtttaacttt

SEQ ID NO: 5383 - RNA, 20 nt, synthetic construct
  source 1..20: mol_type = other RNA
tttcccagggagagagatcc

SEQ ID NO: 5384 - RNA, 20 nt, synthetic construct
  source 1..20: mol_type = other RNA
tttcccgtgggaagtcggga

SEQ ID NO: 5385 - RNA, 20 nt, synthetic construct
  source 1..20: mol_type = other RNA
tttccctcccaacgtaacaa

SEQ ID NO: 5386 - RNA, 20 nt, synthetic construct
  source 1..20: mol_type = other RNA
tttccctctcatgcgattta

SEQ ID NO: 5387 - RNA, 20 nt, synthetic construct
  source 1..20: mol_type = other RNA
tttccctctgcgtgtaagtc

SEQ ID NO: 5388 - RNA, 20 nt, synthetic construct
  source 1..20: mol_type = other RNA
tttcccttgaggagaggcct

SEQ ID NO: 5389 - RNA, 20 nt, synthetic construct
  source 1..20: mol_type = other RNA
tttccgctcccttctccctc

SEQ ID NO: 5390 - RNA, 20 nt, synthetic construct
  source 1..20: mol_type = other RNA
tttccgctcgggcagcgggc

SEQ ID NO: 5391 - RNA, 20 nt, synthetic construct
  source 1..20: mol_type = other RNA
tttcctacactcctcttcac

SEQ ID NO: 5392 - RNA, 20 nt, synthetic construct
  source 1..20: mol_type = other RNA
tttcctggccgggaatggcc

SEQ ID NO: 5393 - RNA, 20 nt, synthetic construct
  source 1..20: mol_type = other RNA
tttcctgggaactgcctact

SEQ ID NO: 5394 - RNA, 20 nt, synthetic construct
  source 1..20: mol_type = other RNA
tttcctgggtcaggacgctt

SEQ ID NO: 5395 - RNA, 20 nt, synthetic construct
  source 1..20: mol_type = other RNA
tttcgagcattttccgctcc

SEQ ID NO: 5396 - RNA, 20 nt, synthetic construct
  source 1..20: mol_type = other RNA
tttcgagcggagggcagcaa

SEQ ID NO: 5397 - RNA, 20 nt, synthetic construct
  source 1..20: mol_type = other RNA
tttcgctcatgtgagactcg

SEQ ID NO: 5398 - RNA, 20 nt, synthetic construct
  source 1..20: mol_type = other RNA
tttctcctcccgccgtgtgt

SEQ ID NO: 5399 - RNA, 20 nt, synthetic construct
  source 1..20: mol_type = other RNA
tttctctccccgatccccca

SEQ ID NO: 5400 - RNA, 20 nt, synthetic construct
  source 1..20: mol_type = other RNA
tttctcttggatatggatgc

SEQ ID NO: 5401 - RNA, 20 nt, synthetic construct
  source 1..20: mol_type = other RNA
tttctgccccccacccccac

SEQ ID NO: 5402 - RNA, 20 nt, synthetic construct
  source 1..20: mol_type = other RNA
tttctgcctttgaagatatt

SEQ ID NO: 5403 - RNA, 20 nt, synthetic construct
  source 1..20: mol_type = other RNA
tttctggcttcccacctcag

SEQ ID NO: 5404 - RNA, 20 nt, synthetic construct
  source 1..20: mol_type = other RNA
tttctgtcggacccttacct

SEQ ID NO: 5405 - RNA, 20 nt, synthetic construct
  source 1..20: mol_type = other RNA
tttgaagatattctcacaag

SEQ ID NO: 5406 - RNA, 20 nt, synthetic construct
  source 1..20: mol_type = other RNA
tttggctcgctccgcctttc

SEQ ID NO: 5407 - RNA, 20 nt, synthetic construct
  source 1..20: mol_type = other RNA
tttgggaagcagccatctga

SEQ ID NO: 5408 - RNA, 20 nt, synthetic construct
  source 1..20: mol_type = other RNA
tttgtgttttcacacacggc

SEQ ID NO: 5409 - RNA, 20 nt, synthetic construct
  source 1..20: mol_type = other RNA
tttgttacgttgggagggaa

SEQ ID NO: 5410 - RNA, 20 nt, synthetic construct
  source 1..20: mol_type = other RNA
ttttacttgccttgggcgtg

SEQ ID NO: 5411 - RNA, 20 nt, synthetic construct
  source 1..20: mol_type = other RNA
ttttcacacacggcgggagg

SEQ ID NO: 5412 - RNA, 20 nt, synthetic construct
  source 1..20: mol_type = other RNA
ttttcccagggagagagatc

SEQ ID NO: 5413 - RNA, 20 nt, synthetic construct
  source 1..20: mol_type = other RNA
ttttccgctcccttctccct

SEQ ID NO: 5414 - RNA, 20 nt, synthetic construct
  source 1..20: mol_type = other RNA
ttttcctgggtcaggacgct

SEQ ID NO: 5415 - RNA, 20 nt, synthetic construct
  source 1..20: mol_type = other RNA
ttttctctccccgatccccc

SEQ ID NO: 5416 - RNA, 20 nt, synthetic construct
  source 1..20: mol_type = other RNA
ttttctgcctttgaagatat

SEQ ID NO: 5417 - RNA, 20 nt, synthetic construct
  source 1..20: mol_type = other RNA
ttttctggcttcccacctca

SEQ ID NO: 5418 - RNA, 20 nt, synthetic construct
  source 1..20: mol_type = other RNA
ttttctgtcggacccttacc

SEQ ID NO: 5419 - RNA, 20 nt, synthetic construct
  source 1..20: mol_type = other RNA
tttttcctgggtcaggacgc

SEQ ID NO: 5420 - RNA, 20 nt, synthetic construct
  source 1..20: mol_type = other RNA
tttttctctccccgatcccc

SEQ ID NO: 5421 - RNA, 20 nt, synthetic construct
  source 1..20: mol_type = other RNA
tttttctgcctttgaagata

SEQ ID NO: 5422 - RNA, 20 nt, synthetic construct
  source 1..20: mol_type = other RNA
ttttttctctccccgatccc

SEQ ID NO: 5423 - RNA, 21 nt, synthetic construct
  source 1..21: mol_type = other RNA
aaaaaagtatgcctgtgtatt

SEQ ID NO: 5424 - RNA, 21 nt, synthetic construct
  source 1..21: mol_type = other RNA
aaaaacatgaaagggggagtt

SEQ ID NO: 5425 - RNA, 21 nt, synthetic construct
  source 1..21: mol_type = other RNA
aaaaagtatgcctgtgtattt

SEQ ID NO: 5426 - RNA, 21 nt, synthetic construct
  source 1..21: mol_type = other RNA
aaaacacaaatggcgtattct

SEQ ID NO: 5427 - RNA, 21 nt, synthetic construct
  source 1..21: mol_type = other RNA
aaaacatgaaagggggagttg

SEQ ID NO: 5428 - RNA, 21 nt, synthetic construct
  source 1..21: mol_type = other RNA
aaaacgacacaatctggctca

SEQ ID NO: 5429 - RNA, 21 nt, synthetic construct
  source 1..21: mol_type = other RNA
aaaacgagagggaaggcgtcc

SEQ ID NO: 5430 - RNA, 21 nt, synthetic construct
  source 1..21: mol_type = other RNA
aaaagagaccgaacctcacga

SEQ ID NO: 5431 - RNA, 21 nt, synthetic construct
  source 1..21: mol_type = other RNA
aaaagtatgcctgtgtatttc

SEQ ID NO: 5432 - RNA, 21 nt, synthetic construct
  source 1..21: mol_type = other RNA
aaaatattccctttatgaatt

SEQ ID NO: 5433 - RNA, 21 nt, synthetic construct
  source 1..21: mol_type = other RNA
aaaatgctcgaaaccggacgg

SEQ ID NO: 5434 - RNA, 21 nt, synthetic construct
  source 1..21: mol_type = other RNA
aaaatggggtgttgcaacggt

SEQ ID NO: 5435 - RNA, 21 nt, synthetic construct
  source 1..21: mol_type = other RNA
aaacacaaatggcgtattctg

SEQ ID NO: 5436 - RNA, 21 nt, synthetic construct
  source 1..21: mol_type = other RNA
aaacatgaaagggggagttgg

SEQ ID NO: 5437 - RNA, 21 nt, synthetic construct
  source 1..21: mol_type = other RNA
aaacattatgttcccgacttc

SEQ ID NO: 5438 - RNA, 21 nt, synthetic construct
  source 1..21: mol_type = other RNA
aaaccactgcgcggggcgcgg

SEQ ID NO: 5439 - RNA, 21 nt, synthetic construct
  source 1..21: mol_type = other RNA
aaaccagccggaccgaccccc

SEQ ID NO: 5440 - RNA, 21 nt, synthetic construct
  source 1..21: mol_type = other RNA
aaaccgactcccccgaaggaa

SEQ ID NO: 5441 - RNA, 21 nt, synthetic construct
  source 1..21: mol_type = other RNA
aaaccggacggagccattgct

SEQ ID NO: 5442 - RNA, 21 nt, synthetic construct
  source 1..21: mol_type = other RNA
aaacgacacaatctggctcaa

SEQ ID NO: 5443 - RNA, 21 nt, synthetic construct
  source 1..21: mol_type = other RNA
aaacgagagggaaggcgtcca

SEQ ID NO: 5444 - RNA, 21 nt, synthetic construct
  source 1..21: mol_type = other RNA
aaacgccactgaccgcacggg

SEQ ID NO: 5445 - RNA, 21 nt, synthetic construct
  source 1..21: mol_type = other RNA
aaacgccgtggcgccgcgttg

SEQ ID NO: 5446 - RNA, 21 nt, synthetic construct
  source 1..21: mol_type = other RNA
aaacggccaatcggcgacaag

SEQ ID NO: 5447 - RNA, 21 nt, synthetic construct
  source 1..21: mol_type = other RNA
aaacgtggagtaggcagttcc

SEQ ID NO: 5448 - RNA, 21 nt, synthetic construct
  source 1..21: mol_type = other RNA
aaactgttgggaaagcccctt

SEQ ID NO: 5449 - RNA, 21 nt, synthetic construct
  source 1..21: mol_type = other RNA
aaagaccactgacgcccaaga

SEQ ID NO: 5450 - RNA, 21 nt, synthetic construct
  source 1..21: mol_type = other RNA
aaagagaccgaacctcacgat

SEQ ID NO: 5451 - RNA, 21 nt, synthetic construct
  source 1..21: mol_type = other RNA
aaagagccctggttcaagtag

SEQ ID NO: 5452 - RNA, 21 nt, synthetic construct
  source 1..21: mol_type = other RNA
aaagaggggggccggcactac

SEQ ID NO: 5453 - RNA, 21 nt, synthetic construct
  source 1..21: mol_type = other RNA
aaagccccttctatgctaatt

SEQ ID NO: 5454 - RNA, 21 nt, synthetic construct
  source 1..21: mol_type = other RNA
aaagctcctgtcagttacgcc

SEQ ID NO: 5455 - RNA, 21 nt, synthetic construct
  source 1..21: mol_type = other RNA
aaaggcaacccccgcaagcca

SEQ ID NO: 5456 - RNA, 21 nt, synthetic construct
  source 1..21: mol_type = other RNA
aaaggcagaaaaatattccct

SEQ ID NO: 5457 - RNA, 21 nt, synthetic construct
  source 1..21: mol_type = other RNA
aaaggcattaccttcgccacc

SEQ ID NO: 5458 - RNA, 21 nt, synthetic construct
  source 1..21: mol_type = other RNA
aaaggcggagcgagccaaagg

SEQ ID NO: 5459 - RNA, 21 nt, synthetic construct
  source 1..21: mol_type = other RNA
aaagggaatatttttctgcct

SEQ ID NO: 5460 - RNA, 21 nt, synthetic construct
  source 1..21: mol_type = other RNA
aaagggggagttgggtcgcct

SEQ ID NO: 5461 - RNA, 21 nt, synthetic construct
  source 1..21: mol_type = other RNA
aaagggggtgaagaggcgttg

SEQ ID NO: 5462 - RNA, 21 nt, synthetic construct
  source 1..21: mol_type = other RNA
aaaggggtggctggatgcagg

SEQ ID NO: 5463 - RNA, 21 nt, synthetic construct
  source 1..21: mol_type = other RNA
aaaggtaaacgtggagtaggc

SEQ ID NO: 5464 - RNA, 21 nt, synthetic construct
  source 1..21: mol_type = other RNA
aaagtatgcctgtgtatttcg

SEQ ID NO: 5465 - RNA, 21 nt, synthetic construct
  source 1..21: mol_type = other RNA
aaagttaaactgttgggaaag

SEQ ID NO: 5466 - RNA, 21 nt, synthetic construct
  source 1..21: mol_type = other RNA
aaatattccctttatgaattc

SEQ ID NO: 5467 - RNA, 21 nt, synthetic construct
  source 1..21: mol_type = other RNA
aaatcgcatgagagggaaagt

SEQ ID NO: 5468 - RNA, 21 nt, synthetic construct
  source 1..21: mol_type = other RNA
aaatcggctctggcgcgggcg

SEQ ID NO: 5469 - RNA, 21 nt, synthetic construct
  source 1..21: mol_type = other RNA
aaatgctcgaaaccggacgga

SEQ ID NO: 5470 - RNA, 21 nt, synthetic construct
  source 1..21: mol_type = other RNA
aaatggcgtattctggttgga

SEQ ID NO: 5471 - RNA, 21 nt, synthetic construct
  source 1..21: mol_type = other RNA
aaatggggtgttgcaacggtg

SEQ ID NO: 5472 - RNA, 21 nt, synthetic construct
  source 1..21: mol_type = other RNA
aacaaacattatgttcccgac

SEQ ID NO: 5473 - RNA, 21 nt, synthetic construct
  source 1..21: mol_type = other RNA
aacacaaatggcgtattctgg

SEQ ID NO: 5474 - RNA, 21 nt, synthetic construct
  source 1..21: mol_type = other RNA
aacacagtagtgccggccccc

SEQ ID NO: 5475 - RNA, 21 nt, synthetic construct
  source 1..21: mol_type = other RNA
aacaccccattttcccaggga

SEQ ID NO: 5476 - RNA, 21 nt, synthetic construct
  source 1..21: mol_type = other RNA
aacagtttaactttccctctc

SEQ ID NO: 5477 - RNA, 21 nt, synthetic construct
  source 1..21: mol_type = other RNA
aacataatgtttgttacgttg

SEQ ID NO: 5478 - RNA, 21 nt, synthetic construct
  source 1..21: mol_type = other RNA
aacatgaaagggggagttggg

SEQ ID NO: 5479 - RNA, 21 nt, synthetic construct
  source 1..21: mol_type = other RNA
aacattatgttcccgacttcc

SEQ ID NO: 5480 - RNA, 21 nt, synthetic construct
  source 1..21: mol_type = other RNA
aaccagaatacgccatttgtg

SEQ ID NO: 5481 - RNA, 21 nt, synthetic construct
  source 1..21: mol_type = other RNA
aaccagccggaccgacccccg

SEQ ID NO: 5482 - RNA, 21 nt, synthetic construct
  source 1..21: mol_type = other RNA
aaccagggctctttcctacac

SEQ ID NO: 5483 - RNA, 21 nt, synthetic construct
  source 1..21: mol_type = other RNA
aacccccgcaagccaccagac

SEQ ID NO: 5484 - RNA, 21 nt, synthetic construct
  source 1..21: mol_type = other RNA
aaccctacacattcaacgagg

SEQ ID NO: 5485 - RNA, 21 nt, synthetic construct
  source 1..21: mol_type = other RNA
aaccgactcccccgaaggaag

SEQ ID NO: 5486 - RNA, 21 nt, synthetic construct
  source 1..21: mol_type = other RNA
aaccggacggagccattgctc

SEQ ID NO: 5487 - RNA, 21 nt, synthetic construct
  source 1..21: mol_type = other RNA
aaccggagggggagggagaag

SEQ ID NO: 5488 - RNA, 21 nt, synthetic construct
  source 1..21: mol_type = other RNA
aacctcacgatcgggccccag

SEQ ID NO: 5489 - RNA, 21 nt, synthetic construct
  source 1..21: mol_type = other RNA
aacgacacaatctggctcaac

SEQ ID NO: 5490 - RNA, 21 nt, synthetic construct
  source 1..21: mol_type = other RNA
aacgagagggaaggcgtccag

SEQ ID NO: 5491 - RNA, 21 nt, synthetic construct
  source 1..21: mol_type = other RNA
aacgaggctatctcagacacg

SEQ ID NO: 5492 - RNA, 21 nt, synthetic construct
  source 1..21: mol_type = other RNA
aacgatcttgtgagaatatct

SEQ ID NO: 5493 - RNA, 21 nt, synthetic construct
  source 1..21: mol_type = other RNA
aacgccactgaccgcacgggg

SEQ ID NO: 5494 - RNA, 21 nt, synthetic construct
  source 1..21: mol_type = other RNA
aacgccgtggcgccgcgttgg

SEQ ID NO: 5495 - RNA, 21 nt, synthetic construct
  source 1..21: mol_type = other RNA
aacgcctcttcaccccctttc

SEQ ID NO: 5496 - RNA, 21 nt, synthetic construct
  source 1..21: mol_type = other RNA
aacgcgagagtcgctaagcgg

SEQ ID NO: 5497 - RNA, 21 nt, synthetic construct
  source 1..21: mol_type = other RNA
aacgcggcgccacggcgtttc

SEQ ID NO: 5498 - RNA, 21 nt, synthetic construct
  source 1..21: mol_type = other RNA
aacggccaatcggcgacaaga

SEQ ID NO: 5499 - RNA, 21 nt, synthetic construct
  source 1..21: mol_type = other RNA
aacgggggtagggagtggggg

SEQ ID NO: 5500 - RNA, 21 nt, synthetic construct
  source 1..21: mol_type = other RNA
aacggtgtgtgcaaggcggcg

SEQ ID NO: 5501 - RNA, 21 nt, synthetic construct
  source 1..21: mol_type = other RNA
aacgtaacaaacattatgttc

SEQ ID NO: 5502 - RNA, 21 nt, synthetic construct
  source 1..21: mol_type = other RNA
aacgtggagtaggcagttccc

SEQ ID NO: 5503 - RNA, 21 nt, synthetic construct
  source 1..21: mol_type = other RNA
aacgtggcaggaagcgcgcgc

SEQ ID NO: 5504 - RNA, 21 nt, synthetic construct
  source 1..21: mol_type = other RNA
aacgtgtggtgggggtggcga

SEQ ID NO: 5505 - RNA, 21 nt, synthetic construct
  source 1..21: mol_type = other RNA
aactccaggctcgaaccctac

SEQ ID NO: 5506 - RNA, 21 nt, synthetic construct
  source 1..21: mol_type = other RNA
aactccccctttcatgttttt

SEQ ID NO: 5507 - RNA, 21 nt, synthetic construct
  source 1..21: mol_type = other RNA
aactcgagtcctgccgcctcc

SEQ ID NO: 5508 - RNA, 21 nt, synthetic construct
  source 1..21: mol_type = other RNA
aactctgatcgctctgggggc

SEQ ID NO: 5509 - RNA, 21 nt, synthetic construct
  source 1..21: mol_type = other RNA
aactctggtgggaggggaggt

SEQ ID NO: 5510 - RNA, 21 nt, synthetic construct
  source 1..21: mol_type = other RNA
aactgacaggagctttactcc

SEQ ID NO: 5511 - RNA, 21 nt, synthetic construct
  source 1..21: mol_type = other RNA
aactgcctactccacgtttac

SEQ ID NO: 5512 - RNA, 21 nt, synthetic construct
  source 1..21: mol_type = other RNA
aactgttgggaaagccccttc

SEQ ID NO: 5513 - RNA, 21 nt, synthetic construct
  source 1..21: mol_type = other RNA
aactttccctctcatgcgatt

SEQ ID NO: 5514 - RNA, 21 nt, synthetic construct
  source 1..21: mol_type = other RNA
aagaagtgagacaagcaagga

SEQ ID NO: 5515 - RNA, 21 nt, synthetic construct
  source 1..21: mol_type = other RNA
aagacaagcaggcggcgggta

SEQ ID NO: 5516 - RNA, 21 nt, synthetic construct
  source 1..21: mol_type = other RNA
aagaccactgacgcccaagaa

SEQ ID NO: 5517 - RNA, 21 nt, synthetic construct
  source 1..21: mol_type = other RNA
aagagaaagaccactgacgcc

SEQ ID NO: 5518 - RNA, 21 nt, synthetic construct
  source 1..21: mol_type = other RNA
aagagaccgaacctcacgatc

SEQ ID NO: 5519 - RNA, 21 nt, synthetic construct
  source 1..21: mol_type = other RNA
aagagccctggttcaagtagg

SEQ ID NO: 5520 - RNA, 21 nt, synthetic construct
  source 1..21: mol_type = other RNA
aagagcttggggagggccagg

SEQ ID NO: 5521 - RNA, 21 nt, synthetic construct
  source 1..21: mol_type = other RNA
aagaggagtgtaggaaagagc

SEQ ID NO: 5522 - RNA, 21 nt, synthetic construct
  source 1..21: mol_type = other RNA
aagaggcctctcctcaaggga

SEQ ID NO: 5523 - RNA, 21 nt, synthetic construct
  source 1..21: mol_type = other RNA
aagaggcgttgggggagggga

SEQ ID NO: 5524 - RNA, 21 nt, synthetic construct
  source 1..21: mol_type = other RNA
aagaggctagccggaagcgct

SEQ ID NO: 5525 - RNA, 21 nt, synthetic construct
  source 1..21: mol_type = other RNA
aagaggctgtgcttcggcgct

SEQ ID NO: 5526 - RNA, 21 nt, synthetic construct
  source 1..21: mol_type = other RNA
aagaggggggccggcactact

SEQ ID NO: 5527 - RNA, 21 nt, synthetic construct
  source 1..21: mol_type = other RNA
aagatattctcacaagatcgt

SEQ ID NO: 5528 - RNA, 21 nt, synthetic construct
  source 1..21: mol_type = other RNA
aagatcgttctccacgcccaa

SEQ ID NO: 5529 - RNA, 21 nt, synthetic construct
  source 1..21: mol_type = other RNA
aagattacggaggggagatcg

SEQ ID NO: 5530 - RNA, 21 nt, synthetic construct
  source 1..21: mol_type = other RNA
aagcaaggactctatagaatc

SEQ ID NO: 5531 - RNA, 21 nt, synthetic construct
  source 1..21: mol_type = other RNA
aagcacagcctcttctctagg

SEQ ID NO: 5532 - RNA, 21 nt, synthetic construct
  source 1..21: mol_type = other RNA
aagcagccatctgaggtggga

SEQ ID NO: 5533 - RNA, 21 nt, synthetic construct
  source 1..21: mol_type = other RNA
aagcaggcggcgggtaaaccg

SEQ ID NO: 5534 - RNA, 21 nt, synthetic construct
  source 1..21: mol_type = other RNA
aagccaccagacggcccccct

SEQ ID NO: 5535 - RNA, 21 nt, synthetic construct
  source 1..21: mol_type = other RNA
aagccagaaaacgagagggaa

SEQ ID NO: 5536 - RNA, 21 nt, synthetic construct
  source 1..21: mol_type = other RNA
aagccccttctatgctaattg

SEQ ID NO: 5537 - RNA, 21 nt, synthetic construct
  source 1..21: mol_type = other RNA
aagcccgacctgctacaggca

SEQ ID NO: 5538 - RNA, 21 nt, synthetic construct
  source 1..21: mol_type = other RNA
aagccgccggggccgcctaga

SEQ ID NO: 5539 - RNA, 21 nt, synthetic construct
  source 1..21: mol_type = other RNA
aagcgctcctccctctgcgag

SEQ ID NO: 5540 - RNA, 21 nt, synthetic construct
  source 1..21: mol_type = other RNA
aagcggctgcgtactcccgac

SEQ ID NO: 5541 - RNA, 21 nt, synthetic construct
  source 1..21: mol_type = other RNA
aagcgtcctgacccaggaaaa

SEQ ID NO: 5542 - RNA, 21 nt, synthetic construct
  source 1..21: mol_type = other RNA
aagctcctgtcagttacgccg

SEQ ID NO: 5543 - RNA, 21 nt, synthetic construct
  source 1..21: mol_type = other RNA
aagctcttaggaggatgctgc

SEQ ID NO: 5544 - RNA, 21 nt, synthetic construct
  source 1..21: mol_type = other RNA
aagctgtgggaccgggccctt

SEQ ID NO: 5545 - RNA, 21 nt, synthetic construct
  source 1..21: mol_type = other RNA
aaggaaggggagggtgggagg

SEQ ID NO: 5546 - RNA, 21 nt, synthetic construct
  source 1..21: mol_type = other RNA
aaggactctatagaatcaatt

SEQ ID NO: 5547 - RNA, 21 nt, synthetic construct
  source 1..21: mol_type = other RNA
aaggagagcgagcgcggggag

SEQ ID NO: 5548 - RNA, 21 nt, synthetic construct
  source 1..21: mol_type = other RNA
aaggcaacccccgcaagccac

SEQ ID NO: 5549 - RNA, 21 nt, synthetic construct
  source 1..21: mol_type = other RNA
aaggcaagtaaaacgacacaa

SEQ ID NO: 5550 - RNA, 21 nt, synthetic construct
  source 1..21: mol_type = other RNA
aaggcagaaaaatattccctt

SEQ ID NO: 5551 - RNA, 21 nt, synthetic construct
  source 1..21: mol_type = other RNA
aaggcattaccttcgccaccc

SEQ ID NO: 5552 - RNA, 21 nt, synthetic construct
  source 1..21: mol_type = other RNA
aaggccgcgagaacgggggta

SEQ ID NO: 5553 - RNA, 21 nt, synthetic construct
  source 1..21: mol_type = other RNA
aaggcggagcgagccaaaggc

SEQ ID NO: 5554 - RNA, 21 nt, synthetic construct
  source 1..21: mol_type = other RNA
aaggcggcgaggggggtgaga

SEQ ID NO: 5555 - RNA, 21 nt, synthetic construct
  source 1..21: mol_type = other RNA
aaggcgtccaggaagattacg

SEQ ID NO: 5556 - RNA, 21 nt, synthetic construct
  source 1..21: mol_type = other RNA
aagggaaaggtaaacgtggag

SEQ ID NO: 5557 - RNA, 21 nt, synthetic construct
  source 1..21: mol_type = other RNA
aagggaatatttttctgcctt

SEQ ID NO: 5558 - RNA, 21 nt, synthetic construct
  source 1..21: mol_type = other RNA
aagggagcggaaaatgctcga

SEQ ID NO: 5559 - RNA, 21 nt, synthetic construct
  source 1..21: mol_type = other RNA
aagggcccggtcccacagctt

SEQ ID NO: 5560 - RNA, 21 nt, synthetic construct
  source 1..21: mol_type = other RNA
aagggcgagacaagcccgacc

SEQ ID NO: 5561 - RNA, 21 nt, synthetic construct
  source 1..21: mol_type = other RNA
aaggggagggtgggaggacgc

SEQ ID NO: 5562 - RNA, 21 nt, synthetic construct
  source 1..21: mol_type = other RNA
aaggggctttcccaacagttt

SEQ ID NO: 5563 - RNA, 21 nt, synthetic construct
  source 1..21: mol_type = other RNA
aagggggagttgggtcgccta

SEQ ID NO: 5564 - RNA, 21 nt, synthetic construct
  source 1..21: mol_type = other RNA
aagggggtgaagaggcgttgg

SEQ ID NO: 5565 - RNA, 21 nt, synthetic construct
  source 1..21: mol_type = other RNA
aaggggtggctggatgcaggc

SEQ ID NO: 5566 - RNA, 21 nt, synthetic construct
  source 1..21: mol_type = other RNA
aagggtcacctcctccgtctc

SEQ ID NO: 5567 - RNA, 21 nt, synthetic construct
  source 1..21: mol_type = other RNA
aagggtccgacagaaaagaga

SEQ ID NO: 5568 - RNA, 21 nt, synthetic construct
  source 1..21: mol_type = other RNA
aaggtaaacgtggagtaggca

SEQ ID NO: 5569 - RNA, 21 nt, synthetic construct
  source 1..21: mol_type = other RNA
aaggtaagggtccgacagaaa

SEQ ID NO: 5570 - RNA, 21 nt, synthetic construct
  source 1..21: mol_type = other RNA
aaggtaatgcctttgggaagc

SEQ ID NO: 5571 - RNA, 21 nt, synthetic construct
  source 1..21: mol_type = other RNA
aagtaaaacgacacaatctgg

SEQ ID NO: 5572 - RNA, 21 nt, synthetic construct
  source 1..21: mol_type = other RNA
aagtaggtaaatcgcatgaga

SEQ ID NO: 5573 - RNA, 21 nt, synthetic construct
  source 1..21: mol_type = other RNA
aagtatgcctgtgtatttcga

SEQ ID NO: 5574 - RNA, 21 nt, synthetic construct
  source 1..21: mol_type = other RNA
aagtcgggaacataatgtttg

SEQ ID NO: 5575 - RNA, 21 nt, synthetic construct
  source 1..21: mol_type = other RNA
aagtcgggaatgtgaagagga

SEQ ID NO: 5576 - RNA, 21 nt, synthetic construct
  source 1..21: mol_type = other RNA
aagtctcggccggcagcccgc

SEQ ID NO: 5577 - RNA, 21 nt, synthetic construct
  source 1..21: mol_type = other RNA
aagtgagacaagcaaggactc

SEQ ID NO: 5578 - RNA, 21 nt, synthetic construct
  source 1..21: mol_type = other RNA
aagtggcagcatcctcctaag

SEQ ID NO: 5579 - RNA, 21 nt, synthetic construct
  source 1..21: mol_type = other RNA
aagttaaactgttgggaaagc

SEQ ID NO: 5580 - RNA, 21 nt, synthetic construct
  source 1..21: mol_type = other RNA
aatacgccatttgtgttttca

SEQ ID NO: 5581 - RNA, 21 nt, synthetic construct
  source 1..21: mol_type = other RNA
aatatcttcaaaggcagaaaa

SEQ ID NO: 5582 - RNA, 21 nt, synthetic construct
  source 1..21: mol_type = other RNA
aatattccctttatgaattct

SEQ ID NO: 5583 - RNA, 21 nt, synthetic construct
  source 1..21: mol_type = other RNA
aatatttttctgcctttgaag

SEQ ID NO: 5584 - RNA, 21 nt, synthetic construct
  source 1..21: mol_type = other RNA
aatcaattagcatagaagggg

SEQ ID NO: 5585 - RNA, 21 nt, synthetic construct
  source 1..21: mol_type = other RNA
aatcagcggaagccgccgggg

SEQ ID NO: 5586 - RNA, 21 nt, synthetic construct
  source 1..21: mol_type = other RNA
aatcaggtgtcgaagacaagc

SEQ ID NO: 5587 - RNA, 21 nt, synthetic construct
  source 1..21: mol_type = other RNA
aatccccgtgcggtcagtggc

SEQ ID NO: 5588 - RNA, 21 nt, synthetic construct
  source 1..21: mol_type = other RNA
aatcgcatgagagggaaagtt

SEQ ID NO: 5589 - RNA, 21 nt, synthetic construct
  source 1..21: mol_type = other RNA
aatcggcgacaagaggctagc

SEQ ID NO: 5590 - RNA, 21 nt, synthetic construct
  source 1..21: mol_type = other RNA
aatcggctctggcgcgggcgt

SEQ ID NO: 5591 - RNA, 21 nt, synthetic construct
  source 1..21: mol_type = other RNA
aatctaggcgacccaactccc

SEQ ID NO: 5592 - RNA, 21 nt, synthetic construct
  source 1..21: mol_type = other RNA
aatctggctcaactccaggct

SEQ ID NO: 5593 - RNA, 21 nt, synthetic construct
  source 1..21: mol_type = other RNA
aatcttcctggacgccttccc

SEQ ID NO: 5594 - RNA, 21 nt, synthetic construct
  source 1..21: mol_type = other RNA
aatgcctttgggaagcagcca

SEQ ID NO: 5595 - RNA, 21 nt, synthetic construct
  source 1..21: mol_type = other RNA
aatgctcgaaaccggacggag

SEQ ID NO: 5596 - RNA, 21 nt, synthetic construct
  source 1..21: mol_type = other RNA
aatggcccgtacccgtgaggt

SEQ ID NO: 5597 - RNA, 21 nt, synthetic construct
  source 1..21: mol_type = other RNA
aatggcgcggcgggagggggc

SEQ ID NO: 5598 - RNA, 21 nt, synthetic construct
  source 1..21: mol_type = other RNA
aatggcgtattctggttggag

SEQ ID NO: 5599 - RNA, 21 nt, synthetic construct
  source 1..21: mol_type = other RNA
aatggctccgtccggtttcga

SEQ ID NO: 5600 - RNA, 21 nt, synthetic construct
  source 1..21: mol_type = other RNA
aatggggtgttgcaacggtgt

SEQ ID NO: 5601 - RNA, 21 nt, synthetic construct
  source 1..21: mol_type = other RNA
aatgggtgcggggcggtgggc

SEQ ID NO: 5602 - RNA, 21 nt, synthetic construct
  source 1..21: mol_type = other RNA
aatgtgaagaggagtgtagga

SEQ ID NO: 5603 - RNA, 21 nt, synthetic construct
  source 1..21: mol_type = other RNA
aatgtgtagggttcgagcctg

SEQ ID NO: 5604 - RNA, 21 nt, synthetic construct
  source 1..21: mol_type = other RNA
aatgtttgttacgttgggagg

SEQ ID NO: 5605 - RNA, 21 nt, synthetic construct
  source 1..21: mol_type = other RNA
aattagcatagaaggggcttt

SEQ ID NO: 5606 - RNA, 21 nt, synthetic construct
  source 1..21: mol_type = other RNA
aattcataaagggaatatttt

SEQ ID NO: 5607 - RNA, 21 nt, synthetic construct
  source 1..21: mol_type = other RNA
aattctctttccctctgcgtg

SEQ ID NO: 5608 - RNA, 21 nt, synthetic construct
  source 1..21: mol_type = other RNA
aattgattctatagagtcctt

SEQ ID NO: 5609 - RNA, 21 nt, synthetic construct
  source 1..21: mol_type = other RNA
acaaacattatgttcccgact

SEQ ID NO: 5610 - RNA, 21 nt, synthetic construct
  source 1..21: mol_type = other RNA
acaaatggcgtattctggttg

SEQ ID NO: 5611 - RNA, 21 nt, synthetic construct
  source 1..21: mol_type = other RNA
acaactctgatcgctctgggg

SEQ ID NO: 5612 - RNA, 21 nt, synthetic construct
  source 1..21: mol_type = other RNA
acaagaggctagccggaagcg

SEQ ID NO: 5613 - RNA, 21 nt, synthetic construct
  source 1..21: mol_type = other RNA
acaagatcgttctccacgccc

SEQ ID NO: 5614 - RNA, 21 nt, synthetic construct
  source 1..21: mol_type = other RNA
acaagcaaggactctatagaa

SEQ ID NO: 5615 - RNA, 21 nt, synthetic construct
  source 1..21: mol_type = other RNA
acaagcaggcggcgggtaaac

SEQ ID NO: 5616 - RNA, 21 nt, synthetic construct
  source 1..21: mol_type = other RNA
acaagcccgacctgctacagg

SEQ ID NO: 5617 - RNA, 21 nt, synthetic construct
  source 1..21: mol_type = other RNA
acaaggccgcgagaacggggg

SEQ ID NO: 5618 - RNA, 21 nt, synthetic construct
  source 1..21: mol_type = other RNA
acaaggtaagggtccgacaga

SEQ ID NO: 5619 - RNA, 21 nt, synthetic construct
  source 1..21: mol_type = other RNA
acaatctggctcaactccagg

SEQ ID NO: 5620 - RNA, 21 nt, synthetic construct
  source 1..21: mol_type = other RNA
acacaaatggcgtattctggt

SEQ ID NO: 5621 - RNA, 21 nt, synthetic construct
  source 1..21: mol_type = other RNA
acacaatctggctcaactcca

SEQ ID NO: 5622 - RNA, 21 nt, synthetic construct
  source 1..21: mol_type = other RNA
acacaccgttgcaacacccca

SEQ ID NO: 5623 - RNA, 21 nt, synthetic construct
  source 1..21: mol_type = other RNA
acacacggcgggaggagaaac

SEQ ID NO: 5624 - RNA, 21 nt, synthetic construct
  source 1..21: mol_type = other RNA
acacagtagtgccggcccccc

SEQ ID NO: 5625 - RNA, 21 nt, synthetic construct
  source 1..21: mol_type = other RNA
acacattcaacgaggctatct

SEQ ID NO: 5626 - RNA, 21 nt, synthetic construct
  source 1..21: mol_type = other RNA
acacccagcatctctacaccc

SEQ ID NO: 5627 - RNA, 21 nt, synthetic construct
  source 1..21: mol_type = other RNA
acaccccacctacctacccgc

SEQ ID NO: 5628 - RNA, 21 nt, synthetic construct
  source 1..21: mol_type = other RNA
acaccccattttcccagggag

SEQ ID NO: 5629 - RNA, 21 nt, synthetic construct
  source 1..21: mol_type = other RNA
acaccgttgcaacaccccatt

SEQ ID NO: 5630 - RNA, 21 nt, synthetic construct
  source 1..21: mol_type = other RNA
acacctgattggctgtcgaag

SEQ ID NO: 5631 - RNA, 21 nt, synthetic construct
  source 1..21: mol_type = other RNA
acacgcagagggaaagagaat

SEQ ID NO: 5632 - RNA, 21 nt, synthetic construct
  source 1..21: mol_type = other RNA
acacgccacggggagccagag

SEQ ID NO: 5633 - RNA, 21 nt, synthetic construct
  source 1..21: mol_type = other RNA
acacgccccctcccgccgcgc

SEQ ID NO: 5634 - RNA, 21 nt, synthetic construct
  source 1..21: mol_type = other RNA
acacgctgtggcacacgccac

SEQ ID NO: 5635 - RNA, 21 nt, synthetic construct
  source 1..21: mol_type = other RNA
acacggcgggaggagaaacgg

SEQ ID NO: 5636 - RNA, 21 nt, synthetic construct
  source 1..21: mol_type = other RNA
acacgttctctggctccccgt

SEQ ID NO: 5637 - RNA, 21 nt, synthetic construct
  source 1..21: mol_type = other RNA
acactcctcttcacattcccg

SEQ ID NO: 5638 - RNA, 21 nt, synthetic construct
  source 1..21: mol_type = other RNA
acactgcggcgctcggcctcg

SEQ ID NO: 5639 - RNA, 21 nt, synthetic construct
  source 1..21: mol_type = other RNA
acactggggggatgggtggct

SEQ ID NO: 5640 - RNA, 21 nt, synthetic construct
  source 1..21: mol_type = other RNA
acagaaaagagaccgaacctc

SEQ ID NO: 5641 - RNA, 21 nt, synthetic construct
  source 1..21: mol_type = other RNA
acagacaactctgatcgctct

SEQ ID NO: 5642 - RNA, 21 nt, synthetic construct
  source 1..21: mol_type = other RNA
acagccaatcaggtgtcgaag

SEQ ID NO: 5643 - RNA, 21 nt, synthetic construct
  source 1..21: mol_type = other RNA
acagcctcttctctaggcggc

SEQ ID NO: 5644 - RNA, 21 nt, synthetic construct
  source 1..21: mol_type = other RNA
acagcgtgtctgagatagcct

SEQ ID NO: 5645 - RNA, 21 nt, synthetic construct
  source 1..21: mol_type = other RNA
acagcttcgacagccaatcag

SEQ ID NO: 5646 - RNA, 21 nt, synthetic construct
  source 1..21: mol_type = other RNA
acaggagctttactccaacca

SEQ ID NO: 5647 - RNA, 21 nt, synthetic construct
  source 1..21: mol_type = other RNA
acaggcactcgtgggggtggg

SEQ ID NO: 5648 - RNA, 21 nt, synthetic construct
  source 1..21: mol_type = other RNA
acagtagtgccggcccccctc

SEQ ID NO: 5649 - RNA, 21 nt, synthetic construct
  source 1..21: mol_type = other RNA
acagtttaactttccctctca

SEQ ID NO: 5650 - RNA, 21 nt, synthetic construct
  source 1..21: mol_type = other RNA
acataatgtttgttacgttgg

SEQ ID NO: 5651 - RNA, 21 nt, synthetic construct
  source 1..21: mol_type = other RNA
acatgaaagggggagttgggt

SEQ ID NO: 5652 - RNA, 21 nt, synthetic construct
  source 1..21: mol_type = other RNA
acatgagcgaaaccactgcgc

SEQ ID NO: 5653 - RNA, 21 nt, synthetic construct
  source 1..21: mol_type = other RNA
acattatgttcccgacttccc

SEQ ID NO: 5654 - RNA, 21 nt, synthetic construct
  source 1..21: mol_type = other RNA
acattcaacgaggctatctca

SEQ ID NO: 5655 - RNA, 21 nt, synthetic construct
  source 1..21: mol_type = other RNA
acattcccgacttacacgcag

SEQ ID NO: 5656 - RNA, 21 nt, synthetic construct
  source 1..21: mol_type = other RNA
accacacgttctctggctccc

SEQ ID NO: 5657 - RNA, 21 nt, synthetic construct
  source 1..21: mol_type = other RNA
accactgacgcccaagaagtg

SEQ ID NO: 5658 - RNA, 21 nt, synthetic construct
  source 1..21: mol_type = other RNA
accagaatacgccatttgtgt

SEQ ID NO: 5659 - RNA, 21 nt, synthetic construct
  source 1..21: mol_type = other RNA
accagacggcccccctagcca

SEQ ID NO: 5660 - RNA, 21 nt, synthetic construct
  source 1..21: mol_type = other RNA
accagagttccgctcccctac

SEQ ID NO: 5661 - RNA, 21 nt, synthetic construct
  source 1..21: mol_type = other RNA
accagccggaccgacccccgc

SEQ ID NO: 5662 - RNA, 21 nt, synthetic construct
  source 1..21: mol_type = other RNA
accagggctctttcctacact

SEQ ID NO: 5663 - RNA, 21 nt, synthetic construct
  source 1..21: mol_type = other RNA
acccaactccccctttcatgt

SEQ ID NO: 5664 - RNA, 21 nt, synthetic construct
  source 1..21: mol_type = other RNA
acccaaggagagcgagcgcgg

SEQ ID NO: 5665 - RNA, 21 nt, synthetic construct
  source 1..21: mol_type = other RNA
acccagcatctctacacccca

SEQ ID NO: 5666 - RNA, 21 nt, synthetic construct
  source 1..21: mol_type = other RNA
acccaggaaaaacatgaaagg

SEQ ID NO: 5667 - RNA, 21 nt, synthetic construct
  source 1..21: mol_type = other RNA
acccagggggcaacgcgagag

SEQ ID NO: 5668 - RNA, 21 nt, synthetic construct
  source 1..21: mol_type = other RNA
acccatccccccagtgtaccg

SEQ ID NO: 5669 - RNA, 21 nt, synthetic construct
  source 1..21: mol_type = other RNA
acccattggcccactcgccgc

SEQ ID NO: 5670 - RNA, 21 nt, synthetic construct
  source 1..21: mol_type = other RNA
accccacctacctacccgccc

SEQ ID NO: 5671 - RNA, 21 nt, synthetic construct
  source 1..21: mol_type = other RNA
accccattttcccagggagag

SEQ ID NO: 5672 - RNA, 21 nt, synthetic construct
  source 1..21: mol_type = other RNA
acccccaccacacgttctctg

SEQ ID NO: 5673 - RNA, 21 nt, synthetic construct
  source 1..21: mol_type = other RNA
acccccacctcacgggtacgg

SEQ ID NO: 5674 - RNA, 21 nt, synthetic construct
  source 1..21: mol_type = other RNA
acccccacgagtgcctgtagc

SEQ ID NO: 5675 - RNA, 21 nt, synthetic construct
  source 1..21: mol_type = other RNA
acccccctcgccgccttgcac

SEQ ID NO: 5676 - RNA, 21 nt, synthetic construct
  source 1..21: mol_type = other RNA
acccccgcaagccaccagacg

SEQ ID NO: 5677 - RNA, 21 nt, synthetic construct
  source 1..21: mol_type = other RNA
acccccgcgccccgcgcagtg

SEQ ID NO: 5678 - RNA, 21 nt, synthetic construct
  source 1..21: mol_type = other RNA
acccccgctcctcccccaccc

SEQ ID NO: 5679 - RNA, 21 nt, synthetic construct
  source 1..21: mol_type = other RNA
acccccgttctcgcggccttg

SEQ ID NO: 5680 - RNA, 21 nt, synthetic construct
  source 1..21: mol_type = other RNA
accccctttcctgggaactgc

SEQ ID NO: 5681 - RNA, 21 nt, synthetic construct
  source 1..21: mol_type = other RNA
acccctttccctcccaacgta

SEQ ID NO: 5682 - RNA, 21 nt, synthetic construct
  source 1..21: mol_type = other RNA
acccgccccacccagggggca

SEQ ID NO: 5683 - RNA, 21 nt, synthetic construct
  source 1..21: mol_type = other RNA
acccgccgcctgcttgtcttc

SEQ ID NO: 5684 - RNA, 21 nt, synthetic construct
  source 1..21: mol_type = other RNA
acccgtgaggtgggggtgggg

SEQ ID NO: 5685 - RNA, 21 nt, synthetic construct
  source 1..21: mol_type = other RNA
accctacacattcaacgaggc

SEQ ID NO: 5686 - RNA, 21 nt, synthetic construct
  source 1..21: mol_type = other RNA
accctccccttccttcggggg

SEQ ID NO: 5687 - RNA, 21 nt, synthetic construct
  source 1..21: mol_type = other RNA
acccttaccttgtcccaggcg

SEQ ID NO: 5688 - RNA, 21 nt, synthetic construct
  source 1..21: mol_type = other RNA
acccttccctcccctggggcc

SEQ ID NO: 5689 - RNA, 21 nt, synthetic construct
  source 1..21: mol_type = other RNA
accgaacctcacgatcgggcc

SEQ ID NO: 5690 - RNA, 21 nt, synthetic construct
  source 1..21: mol_type = other RNA
accgacccccgctcctccccc

SEQ ID NO: 5691 - RNA, 21 nt, synthetic construct
  source 1..21: mol_type = other RNA
accgactcccccgaaggaagg

SEQ ID NO: 5692 - RNA, 21 nt, synthetic construct
  source 1..21: mol_type = other RNA
accgcacctcccctcccacca

SEQ ID NO: 5693 - RNA, 21 nt, synthetic construct
  source 1..21: mol_type = other RNA
accgcacggggattcccagcg

SEQ ID NO: 5694 - RNA, 21 nt, synthetic construct
  source 1..21: mol_type = other RNA
accgccccgcacccattggcc

SEQ ID NO: 5695 - RNA, 21 nt, synthetic construct
  source 1..21: mol_type = other RNA
accgcctgaagggcgagacaa

SEQ ID NO: 5696 - RNA, 21 nt, synthetic construct
  source 1..21: mol_type = other RNA
accggacggagccattgctct

SEQ ID NO: 5697 - RNA, 21 nt, synthetic construct
  source 1..21: mol_type = other RNA
accggagggggagggagaagg

SEQ ID NO: 5698 - RNA, 21 nt, synthetic construct
  source 1..21: mol_type = other RNA
accgggcccttgctactggct

SEQ ID NO: 5699 - RNA, 21 nt, synthetic construct
  source 1..21: mol_type = other RNA
accgtaccaacgcccgcctcc

SEQ ID NO: 5700 - RNA, 21 nt, synthetic construct
  source 1..21: mol_type = other RNA
accgttgcaacaccccatttt

SEQ ID NO: 5701 - RNA, 21 nt, synthetic construct
  source 1..21: mol_type = other RNA
acctacccgccccacccaggg

SEQ ID NO: 5702 - RNA, 21 nt, synthetic construct
  source 1..21: mol_type = other RNA
acctacctacccgccccaccc

SEQ ID NO: 5703 - RNA, 21 nt, synthetic construct
  source 1..21: mol_type = other RNA
acctacttgaaccagggctct

SEQ ID NO: 5704 - RNA, 21 nt, synthetic construct
  source 1..21: mol_type = other RNA
acctagccgaggctctctgag

SEQ ID NO: 5705 - RNA, 21 nt, synthetic construct
  source 1..21: mol_type = other RNA
acctcacgatcgggccccagg

SEQ ID NO: 5706 - RNA, 21 nt, synthetic construct
  source 1..21: mol_type = other RNA
acctcacgggtacgggccatt

SEQ ID NO: 5707 - RNA, 21 nt, synthetic construct
  source 1..21: mol_type = other RNA
acctcagatggctgcttccca

SEQ ID NO: 5708 - RNA, 21 nt, synthetic construct
  source 1..21: mol_type = other RNA
acctcccctcccaccagagtt

SEQ ID NO: 5709 - RNA, 21 nt, synthetic construct
  source 1..21: mol_type = other RNA
acctcctccgtctccccgcgc

SEQ ID NO: 5710 - RNA, 21 nt, synthetic construct
  source 1..21: mol_type = other RNA
acctgattggctgtcgaagct

SEQ ID NO: 5711 - RNA, 21 nt, synthetic construct
  source 1..21: mol_type = other RNA
acctgctacaggcactcgtgg

SEQ ID NO: 5712 - RNA, 21 nt, synthetic construct
  source 1..21: mol_type = other RNA
accttcgccacccccaccaca

SEQ ID NO: 5713 - RNA, 21 nt, synthetic construct
  source 1..21: mol_type = other RNA
accttgtcccaggcgctgccg

SEQ ID NO: 5714 - RNA, 21 nt, synthetic construct
  source 1..21: mol_type = other RNA
acctttcccttgaggagaggc

SEQ ID NO: 5715 - RNA, 21 nt, synthetic construct
  source 1..21: mol_type = other RNA
acgacacaatctggctcaact

SEQ ID NO: 5716 - RNA, 21 nt, synthetic construct
  source 1..21: mol_type = other RNA
acgacccaaggagagcgagcg

SEQ ID NO: 5717 - RNA, 21 nt, synthetic construct
  source 1..21: mol_type = other RNA
acgagagggaaggcgtccagg

SEQ ID NO: 5718 - RNA, 21 nt, synthetic construct
  source 1..21: mol_type = other RNA
acgaggctatctcagacacgc

SEQ ID NO: 5719 - RNA, 21 nt, synthetic construct
  source 1..21: mol_type = other RNA
acgagtgcctgtagcaggtcg

SEQ ID NO: 5720 - RNA, 21 nt, synthetic construct
  source 1..21: mol_type = other RNA
acgatcgggccccaggggagg

SEQ ID NO: 5721 - RNA, 21 nt, synthetic construct
  source 1..21: mol_type = other RNA
acgatcttgtgagaatatctt

SEQ ID NO: 5722 - RNA, 21 nt, synthetic construct
  source 1..21: mol_type = other RNA
acgcagagggaaagagaattc

SEQ ID NO: 5723 - RNA, 21 nt, synthetic construct
  source 1..21: mol_type = other RNA
acgcagccccagtcccgccag

SEQ ID NO: 5724 - RNA, 21 nt, synthetic construct
  source 1..21: mol_type = other RNA
acgcagccgcttagcgactct

SEQ ID NO: 5725 - RNA, 21 nt, synthetic construct
  source 1..21: mol_type = other RNA
acgccacggggagccagagaa

SEQ ID NO: 5726 - RNA, 21 nt, synthetic construct
  source 1..21: mol_type = other RNA
acgccactgaccgcacgggga

SEQ ID NO: 5727 - RNA, 21 nt, synthetic construct
  source 1..21: mol_type = other RNA
acgccatttgtgttttcacac

SEQ ID NO: 5728 - RNA, 21 nt, synthetic construct
  source 1..21: mol_type = other RNA
acgcccaagaagtgagacaag

SEQ ID NO: 5729 - RNA, 21 nt, synthetic construct
  source 1..21: mol_type = other RNA
acgcccaaggcaagtaaaacg

SEQ ID NO: 5730 - RNA, 21 nt, synthetic construct
  source 1..21: mol_type = other RNA
acgccccctcccgccgcgcca

SEQ ID NO: 5731 - RNA, 21 nt, synthetic construct
  source 1..21: mol_type = other RNA
acgcccgcgccagagccgatt

SEQ ID NO: 5732 - RNA, 21 nt, synthetic construct
  source 1..21: mol_type = other RNA
acgccgtcgggagtacgcagc

SEQ ID NO: 5733 - RNA, 21 nt, synthetic construct
  source 1..21: mol_type = other RNA
acgccgtggcgccgcgttggg

SEQ ID NO: 5734 - RNA, 21 nt, synthetic construct
  source 1..21: mol_type = other RNA
acgcctcttcaccccctttcc

SEQ ID NO: 5735 - RNA, 21 nt, synthetic construct
  source 1..21: mol_type = other RNA
acgccttccctctcgttttct

SEQ ID NO: 5736 - RNA, 21 nt, synthetic construct
  source 1..21: mol_type = other RNA
acgcgagagtcgctaagcggc

SEQ ID NO: 5737 - RNA, 21 nt, synthetic construct
  source 1..21: mol_type = other RNA
acgcggcgccacggcgtttcc

SEQ ID NO: 5738 - RNA, 21 nt, synthetic construct
  source 1..21: mol_type = other RNA
acgctgtggcacacgccacgg

SEQ ID NO: 5739 - RNA, 21 nt, synthetic construct
  source 1..21: mol_type = other RNA
acgcttcccctcccccaacgc

SEQ ID NO: 5740 - RNA, 21 nt, synthetic construct
  source 1..21: mol_type = other RNA
acggagccattgctctcgcag

SEQ ID NO: 5741 - RNA, 21 nt, synthetic construct
  source 1..21: mol_type = other RNA
acggaggaggtgacccttccc

SEQ ID NO: 5742 - RNA, 21 nt, synthetic construct
  source 1..21: mol_type = other RNA
acggaggggagatcgcggccc

SEQ ID NO: 5743 - RNA, 21 nt, synthetic construct
  source 1..21: mol_type = other RNA
acggcactcccgggaggcggc

SEQ ID NO: 5744 - RNA, 21 nt, synthetic construct
  source 1..21: mol_type = other RNA
acggccaatcggcgacaagag

SEQ ID NO: 5745 - RNA, 21 nt, synthetic construct
  source 1..21: mol_type = other RNA
acggcccccctagccacccat

SEQ ID NO: 5746 - RNA, 21 nt, synthetic construct
  source 1..21: mol_type = other RNA
acggcgggaggagaaacggcc

SEQ ID NO: 5747 - RNA, 21 nt, synthetic construct
  source 1..21: mol_type = other RNA
acggcgtaactgacaggagct

SEQ ID NO: 5748 - RNA, 21 nt, synthetic construct
  source 1..21: mol_type = other RNA
acggcgtttcctggccgggaa

SEQ ID NO: 5749 - RNA, 21 nt, synthetic construct
  source 1..21: mol_type = other RNA
acgggaaaggcaacccccgca

SEQ ID NO: 5750 - RNA, 21 nt, synthetic construct
  source 1..21: mol_type = other RNA
acgggccattcccggccagga

SEQ ID NO: 5751 - RNA, 21 nt, synthetic construct
  source 1..21: mol_type = other RNA
acggggagccagagaacgtgt

SEQ ID NO: 5752 - RNA, 21 nt, synthetic construct
  source 1..21: mol_type = other RNA
acggggattcccagcgccggc

SEQ ID NO: 5753 - RNA, 21 nt, synthetic construct
  source 1..21: mol_type = other RNA
acgggggtagggagtggggga

SEQ ID NO: 5754 - RNA, 21 nt, synthetic construct
  source 1..21: mol_type = other RNA
acgggtacgggccattcccgg

SEQ ID NO: 5755 - RNA, 21 nt, synthetic construct
  source 1..21: mol_type = other RNA
acggtcctccccgaggccgag

SEQ ID NO: 5756 - RNA, 21 nt, synthetic construct
  source 1..21: mol_type = other RNA
acggtgtgtgcaaggcggcga

SEQ ID NO: 5757 - RNA, 21 nt, synthetic construct
  source 1..21: mol_type = other RNA
acgtaacaaacattatgttcc

SEQ ID NO: 5758 - RNA, 21 nt, synthetic construct
  source 1..21: mol_type = other RNA
acgtggagtaggcagttccca

SEQ ID NO: 5759 - RNA, 21 nt, synthetic construct
  source 1..21: mol_type = other RNA
acgtggcaggaagcgcgcgct

SEQ ID NO: 5760 - RNA, 21 nt, synthetic construct
  source 1..21: mol_type = other RNA
acgtgtggtgggggtggcgaa

SEQ ID NO: 5761 - RNA, 21 nt, synthetic construct
  source 1..21: mol_type = other RNA
acgttctctggctccccgtgg

SEQ ID NO: 5762 - RNA, 21 nt, synthetic construct
  source 1..21: mol_type = other RNA
acgttgcgcaggggcgcgggg

SEQ ID NO: 5763 - RNA, 21 nt, synthetic construct
  source 1..21: mol_type = other RNA
acgttgggagggaaaggggtg

SEQ ID NO: 5764 - RNA, 21 nt, synthetic construct
  source 1..21: mol_type = other RNA
acgtttacctttcccttgagg

SEQ ID NO: 5765 - RNA, 21 nt, synthetic construct
  source 1..21: mol_type = other RNA
actactgtgttggcggactgg

SEQ ID NO: 5766 - RNA, 21 nt, synthetic construct
  source 1..21: mol_type = other RNA
actcacgcagccccagtcccg

SEQ ID NO: 5767 - RNA, 21 nt, synthetic construct
  source 1..21: mol_type = other RNA
actcagcccgctgcccgagcg

SEQ ID NO: 5768 - RNA, 21 nt, synthetic construct
  source 1..21: mol_type = other RNA
actccaaccagaatacgccat

SEQ ID NO: 5769 - RNA, 21 nt, synthetic construct
  source 1..21: mol_type = other RNA
actccacgtttacctttccct

SEQ ID NO: 5770 - RNA, 21 nt, synthetic construct
  source 1..21: mol_type = other RNA
actccaggctcgaaccctaca

SEQ ID NO: 5771 - RNA, 21 nt, synthetic construct
  source 1..21: mol_type = other RNA
actcccccgaaggaaggggag

SEQ ID NO: 5772 - RNA, 21 nt, synthetic construct
  source 1..21: mol_type = other RNA
actccccctttcatgtttttc

SEQ ID NO: 5773 - RNA, 21 nt, synthetic construct
  source 1..21: mol_type = other RNA
actcccgacggcgtaactgac

SEQ ID NO: 5774 - RNA, 21 nt, synthetic construct
  source 1..21: mol_type = other RNA
actcccgggaggcggcaggac

SEQ ID NO: 5775 - RNA, 21 nt, synthetic construct
  source 1..21: mol_type = other RNA
actccctacccccgttctcgc

SEQ ID NO: 5776 - RNA, 21 nt, synthetic construct
  source 1..21: mol_type = other RNA
actcctcttcacattcccgac

SEQ ID NO: 5777 - RNA, 21 nt, synthetic construct
  source 1..21: mol_type = other RNA
actcgagccagtagcaagggc

SEQ ID NO: 5778 - RNA, 21 nt, synthetic construct
  source 1..21: mol_type = other RNA
actcgagtcctgccgcctccc

SEQ ID NO: 5779 - RNA, 21 nt, synthetic construct
  source 1..21: mol_type = other RNA
actcgagttaggcccaacgcg

SEQ ID NO: 5780 - RNA, 21 nt, synthetic construct
  source 1..21: mol_type = other RNA
actcgccgccaatcagcggaa

SEQ ID NO: 5781 - RNA, 21 nt, synthetic construct
  source 1..21: mol_type = other RNA
actcgtgggggtgggggagga

SEQ ID NO: 5782 - RNA, 21 nt, synthetic construct
  source 1..21: mol_type = other RNA
actctatagaatcaattagca

SEQ ID NO: 5783 - RNA, 21 nt, synthetic construct
  source 1..21: mol_type = other RNA
actctcgcgttgccccctggg

SEQ ID NO: 5784 - RNA, 21 nt, synthetic construct
  source 1..21: mol_type = other RNA
actctgatcgctctgggggcc

SEQ ID NO: 5785 - RNA, 21 nt, synthetic construct
  source 1..21: mol_type = other RNA
actctggtgggaggggaggtg

SEQ ID NO: 5786 - RNA, 21 nt, synthetic construct
  source 1..21: mol_type = other RNA
actgacaggagctttactcca

SEQ ID NO: 5787 - RNA, 21 nt, synthetic construct
  source 1..21: mol_type = other RNA
actgaccctcccctcccgccg

SEQ ID NO: 5788 - RNA, 21 nt, synthetic construct
  source 1..21: mol_type = other RNA
actgaccgcacggggattccc

SEQ ID NO: 5789 - RNA, 21 nt, synthetic construct
  source 1..21: mol_type = other RNA
actgacgcccaagaagtgaga

SEQ ID NO: 5790 - RNA, 21 nt, synthetic construct
  source 1..21: mol_type = other RNA
actgcagcatccatatccaag

SEQ ID NO: 5791 - RNA, 21 nt, synthetic construct
  source 1..21: mol_type = other RNA
actgcctactccacgtttacc

SEQ ID NO: 5792 - RNA, 21 nt, synthetic construct
  source 1..21: mol_type = other RNA
actgcggcgctcggcctcggg

SEQ ID NO: 5793 - RNA, 21 nt, synthetic construct
  source 1..21: mol_type = other RNA
actggcgggactggggctgcg

SEQ ID NO: 5794 - RNA, 21 nt, synthetic construct
  source 1..21: mol_type = other RNA
actggctcgagtctcacatga

SEQ ID NO: 5795 - RNA, 21 nt, synthetic construct
  source 1..21: mol_type = other RNA
actggggctgcgtgagtctct

SEQ ID NO: 5796 - RNA, 21 nt, synthetic construct
  source 1..21: mol_type = other RNA
actggggggatgggtggctag

SEQ ID NO: 5797 - RNA, 21 nt, synthetic construct
  source 1..21: mol_type = other RNA
actgtgttggcggactggcgg

SEQ ID NO: 5798 - RNA, 21 nt, synthetic construct
  source 1..21: mol_type = other RNA
actgttgggaaagccccttct

SEQ ID NO: 5799 - RNA, 21 nt, synthetic construct
  source 1..21: mol_type = other RNA
acttacacgcagagggaaaga

SEQ ID NO: 5800 - RNA, 21 nt, synthetic construct
  source 1..21: mol_type = other RNA
acttcccacgggaaaggcaac

SEQ ID NO: 5801 - RNA, 21 nt, synthetic construct
  source 1..21: mol_type = other RNA
acttctcacccccctcgccgc

SEQ ID NO: 5802 - RNA, 21 nt, synthetic construct
  source 1..21: mol_type = other RNA
acttctggatggcggcggccg

SEQ ID NO: 5803 - RNA, 21 nt, synthetic construct
  source 1..21: mol_type = other RNA
acttcttgggcgtcagtggtc

SEQ ID NO: 5804 - RNA, 21 nt, synthetic construct
  source 1..21: mol_type = other RNA
acttgaaccagggctctttcc

SEQ ID NO: 5805 - RNA, 21 nt, synthetic construct
  source 1..21: mol_type = other RNA
acttgccttgggcgtggagaa

SEQ ID NO: 5806 - RNA, 21 nt, synthetic construct
  source 1..21: mol_type = other RNA
actttccctctcatgcgattt

SEQ ID NO: 5807 - RNA, 21 nt, synthetic construct
  source 1..21: mol_type = other RNA
agaaaacgagagggaaggcgt

SEQ ID NO: 5808 - RNA, 21 nt, synthetic construct
  source 1..21: mol_type = other RNA
agaaaagagaccgaacctcac

SEQ ID NO: 5809 - RNA, 21 nt, synthetic construct
  source 1..21: mol_type = other RNA
agaaacggccaatcggcgaca

SEQ ID NO: 5810 - RNA, 21 nt, synthetic construct
  source 1..21: mol_type = other RNA
agaaagaccactgacgcccaa

SEQ ID NO: 5811 - RNA, 21 nt, synthetic construct
  source 1..21: mol_type = other RNA
agaaaggcggagcgagccaaa

SEQ ID NO: 5812 - RNA, 21 nt, synthetic construct
  source 1..21: mol_type = other RNA
agaacgatcttgtgagaatat

SEQ ID NO: 5813 - RNA, 21 nt, synthetic construct
  source 1..21: mol_type = other RNA
agaacgggggtagggagtggg

SEQ ID NO: 5814 - RNA, 21 nt, synthetic construct
  source 1..21: mol_type = other RNA
agaacgtgtggtgggggtggc

SEQ ID NO: 5815 - RNA, 21 nt, synthetic construct
  source 1..21: mol_type = other RNA
agaagaggctgtgcttcggcg

SEQ ID NO: 5816 - RNA, 21 nt, synthetic construct
  source 1..21: mol_type = other RNA
agaagggagcggaaaatgctc

SEQ ID NO: 5817 - RNA, 21 nt, synthetic construct
  source 1..21: mol_type = other RNA
agaaggggctttcccaacagt

SEQ ID NO: 5818 - RNA, 21 nt, synthetic construct
  source 1..21: mol_type = other RNA
agaagtctcggccggcagccc

SEQ ID NO: 5819 - RNA, 21 nt, synthetic construct
  source 1..21: mol_type = other RNA
agaagtgagacaagcaaggac

SEQ ID NO: 5820 - RNA, 21 nt, synthetic construct
  source 1..21: mol_type = other RNA
agaagtggcagcatcctccta

SEQ ID NO: 5821 - RNA, 21 nt, synthetic construct
  source 1..21: mol_type = other RNA
agaatacgccatttgtgtttt

SEQ ID NO: 5822 - RNA, 21 nt, synthetic construct
  source 1..21: mol_type = other RNA
agaatatcttcaaaggcagaa

SEQ ID NO: 5823 - RNA, 21 nt, synthetic construct
  source 1..21: mol_type = other RNA
agaatcaattagcatagaagg

SEQ ID NO: 5824 - RNA, 21 nt, synthetic construct
  source 1..21: mol_type = other RNA
agaattcataaagggaatatt

SEQ ID NO: 5825 - RNA, 21 nt, synthetic construct
  source 1..21: mol_type = other RNA
agacaactctgatcgctctgg

SEQ ID NO: 5826 - RNA, 21 nt, synthetic construct
  source 1..21: mol_type = other RNA
agacaagcaaggactctatag

SEQ ID NO: 5827 - RNA, 21 nt, synthetic construct
  source 1..21: mol_type = other RNA
agacaagcaggcggcgggtaa

SEQ ID NO: 5828 - RNA, 21 nt, synthetic construct
  source 1..21: mol_type = other RNA
agacaagcccgacctgctaca

SEQ ID NO: 5829 - RNA, 21 nt, synthetic construct
  source 1..21: mol_type = other RNA
agacacgctgtggcacacgcc

SEQ ID NO: 5830 - RNA, 21 nt, synthetic construct
  source 1..21: mol_type = other RNA
agacactgcggcgctcggcct

SEQ ID NO: 5831 - RNA, 21 nt, synthetic construct
  source 1..21: mol_type = other RNA
agaccactgacgcccaagaag

SEQ ID NO: 5832 - RNA, 21 nt, synthetic construct
  source 1..21: mol_type = other RNA
agaccgaacctcacgatcggg

SEQ ID NO: 5833 - RNA, 21 nt, synthetic construct
  source 1..21: mol_type = other RNA
agacggaggaggtgacccttc

SEQ ID NO: 5834 - RNA, 21 nt, synthetic construct
  source 1..21: mol_type = other RNA
agacggcccccctagccaccc

SEQ ID NO: 5835 - RNA, 21 nt, synthetic construct
  source 1..21: mol_type = other RNA
agactcacgcagccccagtcc

SEQ ID NO: 5836 - RNA, 21 nt, synthetic construct
  source 1..21: mol_type = other RNA
agactcgagccagtagcaagg

SEQ ID NO: 5837 - RNA, 21 nt, synthetic construct
  source 1..21: mol_type = other RNA
agacttctggatggcggcggc

SEQ ID NO: 5838 - RNA, 21 nt, synthetic construct
  source 1..21: mol_type = other RNA
agagaaagaccactgacgccc

SEQ ID NO: 5839 - RNA, 21 nt, synthetic construct
  source 1..21: mol_type = other RNA
agagaacgtgtggtgggggtg

SEQ ID NO: 5840 - RNA, 21 nt, synthetic construct
  source 1..21: mol_type = other RNA
agagaagaggctgtgcttcgg

SEQ ID NO: 5841 - RNA, 21 nt, synthetic construct
  source 1..21: mol_type = other RNA
agagaattcataaagggaata

SEQ ID NO: 5842 - RNA, 21 nt, synthetic construct
  source 1..21: mol_type = other RNA
agagaccgaacctcacgatcg

SEQ ID NO: 5843 - RNA, 21 nt, synthetic construct
  source 1..21: mol_type = other RNA
agagactcacgcagccccagt

SEQ ID NO: 5844 - RNA, 21 nt, synthetic construct
  source 1..21: mol_type = other RNA
agagagatccccctctaatct

SEQ ID NO: 5845 - RNA, 21 nt, synthetic construct
  source 1..21: mol_type = other RNA
agagagcctcggctaggtagg

SEQ ID NO: 5846 - RNA, 21 nt, synthetic construct
  source 1..21: mol_type = other RNA
agagatccccctctaatctag

SEQ ID NO: 5847 - RNA, 21 nt, synthetic construct
  source 1..21: mol_type = other RNA
agagatgctgggtgtgcgggc

SEQ ID NO: 5848 - RNA, 21 nt, synthetic construct
  source 1..21: mol_type = other RNA
agagcaatggctccgtccggt

SEQ ID NO: 5849 - RNA, 21 nt, synthetic construct
  source 1..21: mol_type = other RNA
agagccctggttcaagtaggt

SEQ ID NO: 5850 - RNA, 21 nt, synthetic construct
  source 1..21: mol_type = other RNA
agagccgatttcactgaccct

SEQ ID NO: 5851 - RNA, 21 nt, synthetic construct
  source 1..21: mol_type = other RNA
agagcctcggctaggtagggg

SEQ ID NO: 5852 - RNA, 21 nt, synthetic construct
  source 1..21: mol_type = other RNA
agagcgagcgcggggagacgg

SEQ ID NO: 5853 - RNA, 21 nt, synthetic construct
  source 1..21: mol_type = other RNA
agagcgatcagagttgtctgt

SEQ ID NO: 5854 - RNA, 21 nt, synthetic construct
  source 1..21: mol_type = other RNA
agagcttggggagggccaggc

SEQ ID NO: 5855 - RNA, 21 nt, synthetic construct
  source 1..21: mol_type = other RNA
agaggagtgtaggaaagagcc

SEQ ID NO: 5856 - RNA, 21 nt, synthetic construct
  source 1..21: mol_type = other RNA
agaggccaatggcgcggcggg

SEQ ID NO: 5857 - RNA, 21 nt, synthetic construct
  source 1..21: mol_type = other RNA
agaggcctctcctcaagggaa

SEQ ID NO: 5858 - RNA, 21 nt, synthetic construct
  source 1..21: mol_type = other RNA
agaggcctcttgctgccctcc

SEQ ID NO: 5859 - RNA, 21 nt, synthetic construct
  source 1..21: mol_type = other RNA
agaggcgttgggggaggggaa

SEQ ID NO: 5860 - RNA, 21 nt, synthetic construct
  source 1..21: mol_type = other RNA
agaggctagccggaagcgctc

SEQ ID NO: 5861 - RNA, 21 nt, synthetic construct
  source 1..21: mol_type = other RNA
agaggctgtgcttcggcgctc

SEQ ID NO: 5862 - RNA, 21 nt, synthetic construct
  source 1..21: mol_type = other RNA
agagggaaagagaattcataa

SEQ ID NO: 5863 - RNA, 21 nt, synthetic construct
  source 1..21: mol_type = other RNA
agagggaaagttaaactgttg

SEQ ID NO: 5864 - RNA, 21 nt, synthetic construct
  source 1..21: mol_type = other RNA
agagggaaggcgtccaggaag

SEQ ID NO: 5865 - RNA, 21 nt, synthetic construct
  source 1..21: mol_type = other RNA
agagggaggagcgcttccggc

SEQ ID NO: 5866 - RNA, 21 nt, synthetic construct
  source 1..21: mol_type = other RNA
agagggggatctctctccctg

SEQ ID NO: 5867 - RNA, 21 nt, synthetic construct
  source 1..21: mol_type = other RNA
agaggggggccggcactactg

SEQ ID NO: 5868 - RNA, 21 nt, synthetic construct
  source 1..21: mol_type = other RNA
agagtccttgcttgtctcact

SEQ ID NO: 5869 - RNA, 21 nt, synthetic construct
  source 1..21: mol_type = other RNA
agagtcgctaagcggctgcgt

SEQ ID NO: 5870 - RNA, 21 nt, synthetic construct
  source 1..21: mol_type = other RNA
agagttccgctcccctaccta

SEQ ID NO: 5871 - RNA, 21 nt, synthetic construct
  source 1..21: mol_type = other RNA
agagttgtctgtcacaaggcc

SEQ ID NO: 5872 - RNA, 21 nt, synthetic construct
  source 1..21: mol_type = other RNA
agatagcctcgttgaatgtgt

SEQ ID NO: 5873 - RNA, 21 nt, synthetic construct
  source 1..21: mol_type = other RNA
agatattctcacaagatcgtt

SEQ ID NO: 5874 - RNA, 21 nt, synthetic construct
  source 1..21: mol_type = other RNA
agatccccctctaatctaggc

SEQ ID NO: 5875 - RNA, 21 nt, synthetic construct
  source 1..21: mol_type = other RNA
agatcgcggcccccagagcga

SEQ ID NO: 5876 - RNA, 21 nt, synthetic construct
  source 1..21: mol_type = other RNA
agatcgttctccacgcccaag

SEQ ID NO: 5877 - RNA, 21 nt, synthetic construct
  source 1..21: mol_type = other RNA
agatgctgggtgtgcgggcgc

SEQ ID NO: 5878 - RNA, 21 nt, synthetic construct
  source 1..21: mol_type = other RNA
agatggctgcttcccaaaggc

SEQ ID NO: 5879 - RNA, 21 nt, synthetic construct
  source 1..21: mol_type = other RNA
agattacggaggggagatcgc

SEQ ID NO: 5880 - RNA, 21 nt, synthetic construct
  source 1..21: mol_type = other RNA
agattagagggggatctctct

SEQ ID NO: 5881 - RNA, 21 nt, synthetic construct
  source 1..21: mol_type = other RNA
agattgtgtcgttttacttgc

SEQ ID NO: 5882 - RNA, 21 nt, synthetic construct
  source 1..21: mol_type = other RNA
agcaagaggcctctcctcaag

SEQ ID NO: 5883 - RNA, 21 nt, synthetic construct
  source 1..21: mol_type = other RNA
agcaaggactctatagaatca

SEQ ID NO: 5884 - RNA, 21 nt, synthetic construct
  source 1..21: mol_type = other RNA
agcaagggcccggtcccacag

SEQ ID NO: 5885 - RNA, 21 nt, synthetic construct
  source 1..21: mol_type = other RNA
agcaatggctccgtccggttt

SEQ ID NO: 5886 - RNA, 21 nt, synthetic construct
  source 1..21: mol_type = other RNA
agcacagcctcttctctaggc

SEQ ID NO: 5887 - RNA, 21 nt, synthetic construct
  source 1..21: mol_type = other RNA
agcagccatctgaggtgggaa

SEQ ID NO: 5888 - RNA, 21 nt, synthetic construct
  source 1..21: mol_type = other RNA
agcaggcggcgggtaaaccga

SEQ ID NO: 5889 - RNA, 21 nt, synthetic construct
  source 1..21: mol_type = other RNA
agcaggtcgggcttgtctcgc

SEQ ID NO: 5890 - RNA, 21 nt, synthetic construct
  source 1..21: mol_type = other RNA
agcatagaaggggctttccca

SEQ ID NO: 5891 - RNA, 21 nt, synthetic construct
  source 1..21: mol_type = other RNA
agcatccatatccaagagaaa

SEQ ID NO: 5892 - RNA, 21 nt, synthetic construct
  source 1..21: mol_type = other RNA
agcatcctcctaagagcttgg

SEQ ID NO: 5893 - RNA, 21 nt, synthetic construct
  source 1..21: mol_type = other RNA
agcatctctacaccccaccta

SEQ ID NO: 5894 - RNA, 21 nt, synthetic construct
  source 1..21: mol_type = other RNA
agcattttccgctcccttctc

SEQ ID NO: 5895 - RNA, 21 nt, synthetic construct
  source 1..21: mol_type = other RNA
agccaatcaggtgtcgaagac

SEQ ID NO: 5896 - RNA, 21 nt, synthetic construct
  source 1..21: mol_type = other RNA
agccaccagacggccccccta

SEQ ID NO: 5897 - RNA, 21 nt, synthetic construct
  source 1..21: mol_type = other RNA
agccacccatccccccagtgt

SEQ ID NO: 5898 - RNA, 21 nt, synthetic construct
  source 1..21: mol_type = other RNA
agccacccctttccctcccaa

SEQ ID NO: 5899 - RNA, 21 nt, synthetic construct
  source 1..21: mol_type = other RNA
agccagaaaacgagagggaag

SEQ ID NO: 5900 - RNA, 21 nt, synthetic construct
  source 1..21: mol_type = other RNA
agccagagaacgtgtggtggg

SEQ ID NO: 5901 - RNA, 21 nt, synthetic construct
  source 1..21: mol_type = other RNA
agccagattgtgtcgttttac

SEQ ID NO: 5902 - RNA, 21 nt, synthetic construct
  source 1..21: mol_type = other RNA
agccagtagcaagggcccggt

SEQ ID NO: 5903 - RNA, 21 nt, synthetic construct
  source 1..21: mol_type = other RNA
agccatctgaggtgggaagcc

SEQ ID NO: 5904 - RNA, 21 nt, synthetic construct
  source 1..21: mol_type = other RNA
agccattgctctcgcagaggg

SEQ ID NO: 5905 - RNA, 21 nt, synthetic construct
  source 1..21: mol_type = other RNA
agccccagtcccgccagtccg

SEQ ID NO: 5906 - RNA, 21 nt, synthetic construct
  source 1..21: mol_type = other RNA
agccccttctatgctaattga

SEQ ID NO: 5907 - RNA, 21 nt, synthetic construct
  source 1..21: mol_type = other RNA
agcccgacctgctacaggcac

SEQ ID NO: 5908 - RNA, 21 nt, synthetic construct
  source 1..21: mol_type = other RNA
agcccgctgcccgagcggaaa

SEQ ID NO: 5909 - RNA, 21 nt, synthetic construct
  source 1..21: mol_type = other RNA
agccctggttcaagtaggtaa

SEQ ID NO: 5910 - RNA, 21 nt, synthetic construct
  source 1..21: mol_type = other RNA
agccgaggctctctgaggagc

SEQ ID NO: 5911 - RNA, 21 nt, synthetic construct
  source 1..21: mol_type = other RNA
agccgatttcactgaccctcc

SEQ ID NO: 5912 - RNA, 21 nt, synthetic construct
  source 1..21: mol_type = other RNA
agccgccggggccgcctagag

SEQ ID NO: 5913 - RNA, 21 nt, synthetic construct
  source 1..21: mol_type = other RNA
agccgcggccgccgccatcca

SEQ ID NO: 5914 - RNA, 21 nt, synthetic construct
  source 1..21: mol_type = other RNA
agccgcttagcgactctcgcg

SEQ ID NO: 5915 - RNA, 21 nt, synthetic construct
  source 1..21: mol_type = other RNA
agccggaagcgctcctccctc

SEQ ID NO: 5916 - RNA, 21 nt, synthetic construct
  source 1..21: mol_type = other RNA
agccggaccgacccccgctcc

SEQ ID NO: 5917 - RNA, 21 nt, synthetic construct
  source 1..21: mol_type = other RNA
agccggagcgccgaagcacag

SEQ ID NO: 5918 - RNA, 21 nt, synthetic construct
  source 1..21: mol_type = other RNA
agcctcggctaggtaggggag

SEQ ID NO: 5919 - RNA, 21 nt, synthetic construct
  source 1..21: mol_type = other RNA
agcctcgttgaatgtgtaggg

SEQ ID NO: 5920 - RNA, 21 nt, synthetic construct
  source 1..21: mol_type = other RNA
agcctcttctctaggcggccc

SEQ ID NO: 5921 - RNA, 21 nt, synthetic construct
  source 1..21: mol_type = other RNA
agcctcttgtcgccgattggc

SEQ ID NO: 5922 - RNA, 21 nt, synthetic construct
  source 1..21: mol_type = other RNA
agcctggagttgagccagatt

SEQ ID NO: 5923 - RNA, 21 nt, synthetic construct
  source 1..21: mol_type = other RNA
agcgaaaccactgcgcggggc

SEQ ID NO: 5924 - RNA, 21 nt, synthetic construct
  source 1..21: mol_type = other RNA
agcgactctcgcgttgccccc

SEQ ID NO: 5925 - RNA, 21 nt, synthetic construct
  source 1..21: mol_type = other RNA
agcgagcgcggggagacggag

SEQ ID NO: 5926 - RNA, 21 nt, synthetic construct
  source 1..21: mol_type = other RNA
agcgatcagagttgtctgtca

SEQ ID NO: 5927 - RNA, 21 nt, synthetic construct
  source 1..21: mol_type = other RNA
agcgccgaagcacagcctctt

SEQ ID NO: 5928 - RNA, 21 nt, synthetic construct
  source 1..21: mol_type = other RNA
agcgccgcagtgtctggcccc

SEQ ID NO: 5929 - RNA, 21 nt, synthetic construct
  source 1..21: mol_type = other RNA
agcgcctgggacaaggtaagg

SEQ ID NO: 5930 - RNA, 21 nt, synthetic construct
  source 1..21: mol_type = other RNA
agcgcgcgcttcctgccacgt

SEQ ID NO: 5931 - RNA, 21 nt, synthetic construct
  source 1..21: mol_type = other RNA
agcgcggggagacggaggagg

SEQ ID NO: 5932 - RNA, 21 nt, synthetic construct
  source 1..21: mol_type = other RNA
agcgctcctccctctgcgaga

SEQ ID NO: 5933 - RNA, 21 nt, synthetic construct
  source 1..21: mol_type = other RNA
agcgcttccggctagcctctt

SEQ ID NO: 5934 - RNA, 21 nt, synthetic construct
  source 1..21: mol_type = other RNA
agcggaaaatgctcgaaaccg

SEQ ID NO: 5935 - RNA, 21 nt, synthetic construct
  source 1..21: mol_type = other RNA
agcggaaacgccactgaccgc

SEQ ID NO: 5936 - RNA, 21 nt, synthetic construct
  source 1..21: mol_type = other RNA
agcggaactctggtgggaggg

SEQ ID NO: 5937 - RNA, 21 nt, synthetic construct
  source 1..21: mol_type = other RNA
agcggaagccgccggggccgc

SEQ ID NO: 5938 - RNA, 21 nt, synthetic construct
  source 1..21: mol_type = other RNA
agcggagggcagcaagaggcc

SEQ ID NO: 5939 - RNA, 21 nt, synthetic construct
  source 1..21: mol_type = other RNA
agcggctgcgtactcccgacg

SEQ ID NO: 5940 - RNA, 21 nt, synthetic construct
  source 1..21: mol_type = other RNA
agcgggctgagtgagctgccg

SEQ ID NO: 5941 - RNA, 21 nt, synthetic construct
  source 1..21: mol_type = other RNA
agcgtcctgacccaggaaaaa

SEQ ID NO: 5942 - RNA, 21 nt, synthetic construct
  source 1..21: mol_type = other RNA
agcgtgtctgagatagcctcg

SEQ ID NO: 5943 - RNA, 21 nt, synthetic construct
  source 1..21: mol_type = other RNA
agctcactcagcccgctgccc

SEQ ID NO: 5944 - RNA, 21 nt, synthetic construct
  source 1..21: mol_type = other RNA
agctcctgtcagttacgccgt

SEQ ID NO: 5945 - RNA, 21 nt, synthetic construct
  source 1..21: mol_type = other RNA
agctcttaggaggatgctgcc

SEQ ID NO: 5946 - RNA, 21 nt, synthetic construct
  source 1..21: mol_type = other RNA
agctgtgggaccgggcccttg

SEQ ID NO: 5947 - RNA, 21 nt, synthetic construct
  source 1..21: mol_type = other RNA
agcttcgacagccaatcaggt

SEQ ID NO: 5948 - RNA, 21 nt, synthetic construct
  source 1..21: mol_type = other RNA
agcttggggagggccaggccc

SEQ ID NO: 5949 - RNA, 21 nt, synthetic construct
  source 1..21: mol_type = other RNA
agctttactccaaccagaata

SEQ ID NO: 5950 - RNA, 21 nt, synthetic construct
  source 1..21: mol_type = other RNA
aggaaaaacatgaaaggggga

SEQ ID NO: 5951 - RNA, 21 nt, synthetic construct
  source 1..21: mol_type = other RNA
aggaaacgccgtggcgccgcg

SEQ ID NO: 5952 - RNA, 21 nt, synthetic construct
  source 1..21: mol_type = other RNA
aggaaagagccctggttcaag

SEQ ID NO: 5953 - RNA, 21 nt, synthetic construct
  source 1..21: mol_type = other RNA
aggaaagggggtgaagaggcg

SEQ ID NO: 5954 - RNA, 21 nt, synthetic construct
  source 1..21: mol_type = other RNA
aggaagattacggaggggaga

SEQ ID NO: 5955 - RNA, 21 nt, synthetic construct
  source 1..21: mol_type = other RNA
aggaaggggagggtgggagga

SEQ ID NO: 5956 - RNA, 21 nt, synthetic construct
  source 1..21: mol_type = other RNA
aggaccgtaccaacgcccgcc

SEQ ID NO: 5957 - RNA, 21 nt, synthetic construct
  source 1..21: mol_type = other RNA
aggacgcccgcgccagagccg

SEQ ID NO: 5958 - RNA, 21 nt, synthetic construct
  source 1..21: mol_type = other RNA
aggacgcttcccctcccccaa

SEQ ID NO: 5959 - RNA, 21 nt, synthetic construct
  source 1..21: mol_type = other RNA
aggactcgagttaggcccaac

SEQ ID NO: 5960 - RNA, 21 nt, synthetic construct
  source 1..21: mol_type = other RNA
aggactctatagaatcaatta

SEQ ID NO: 5961 - RNA, 21 nt, synthetic construct
  source 1..21: mol_type = other RNA
aggagaaacggccaatcggcg

SEQ ID NO: 5962 - RNA, 21 nt, synthetic construct
  source 1..21: mol_type = other RNA
aggagagcgagcgcggggaga

SEQ ID NO: 5963 - RNA, 21 nt, synthetic construct
  source 1..21: mol_type = other RNA
aggagaggcctcttgctgccc

SEQ ID NO: 5964 - RNA, 21 nt, synthetic construct
  source 1..21: mol_type = other RNA
aggagccggagcgccgaagca

SEQ ID NO: 5965 - RNA, 21 nt, synthetic construct
  source 1..21: mol_type = other RNA
aggagcgcttccggctagcct

SEQ ID NO: 5966 - RNA, 21 nt, synthetic construct
  source 1..21: mol_type = other RNA
aggagctttactccaaccaga

SEQ ID NO: 5967 - RNA, 21 nt, synthetic construct
  source 1..21: mol_type = other RNA
aggaggatgctgccacttctc

SEQ ID NO: 5968 - RNA, 21 nt, synthetic construct
  source 1..21: mol_type = other RNA
aggaggtgacccttccctccc

SEQ ID NO: 5969 - RNA, 21 nt, synthetic construct
  source 1..21: mol_type = other RNA
aggagtgtaggaaagagccct

SEQ ID NO: 5970 - RNA, 21 nt, synthetic construct
  source 1..21: mol_type = other RNA
aggatgctgccacttctcacc

SEQ ID NO: 5971 - RNA, 21 nt, synthetic construct
  source 1..21: mol_type = other RNA
aggcaacccccgcaagccacc

SEQ ID NO: 5972 - RNA, 21 nt, synthetic construct
  source 1..21: mol_type = other RNA
aggcaagtaaaacgacacaat

SEQ ID NO: 5973 - RNA, 21 nt, synthetic construct
  source 1..21: mol_type = other RNA
aggcactcgtgggggtggggg

SEQ ID NO: 5974 - RNA, 21 nt, synthetic construct
  source 1..21: mol_type = other RNA
aggcagaaaaatattcccttt

SEQ ID NO: 5975 - RNA, 21 nt, synthetic construct
  source 1..21: mol_type = other RNA
aggcagttcccaggaaagggg

SEQ ID NO: 5976 - RNA, 21 nt, synthetic construct
  source 1..21: mol_type = other RNA
aggcattaccttcgccacccc

SEQ ID NO: 5977 - RNA, 21 nt, synthetic construct
  source 1..21: mol_type = other RNA
aggccaatggcgcggcgggag

SEQ ID NO: 5978 - RNA, 21 nt, synthetic construct
  source 1..21: mol_type = other RNA
aggcccaacgcggcgccacgg

SEQ ID NO: 5979 - RNA, 21 nt, synthetic construct
  source 1..21: mol_type = other RNA
aggcccacgacccaaggagag

SEQ ID NO: 5980 - RNA, 21 nt, synthetic construct
  source 1..21: mol_type = other RNA
aggccccggcagcgcctggga

SEQ ID NO: 5981 - RNA, 21 nt, synthetic construct
  source 1..21: mol_type = other RNA
aggcccgccctgcggcaaccg

SEQ ID NO: 5982 - RNA, 21 nt, synthetic construct
  source 1..21: mol_type = other RNA
aggccgagcgccgcagtgtct

SEQ ID NO: 5983 - RNA, 21 nt, synthetic construct
  source 1..21: mol_type = other RNA
aggccgcgagaacgggggtag

SEQ ID NO: 5984 - RNA, 21 nt, synthetic construct
  source 1..21: mol_type = other RNA
aggccggccgcgcccgcacac

SEQ ID NO: 5985 - RNA, 21 nt, synthetic construct
  source 1..21: mol_type = other RNA
aggcctctcctcaagggaaag

SEQ ID NO: 5986 - RNA, 21 nt, synthetic construct
  source 1..21: mol_type = other RNA
aggcctcttgctgccctccgc

SEQ ID NO: 5987 - RNA, 21 nt, synthetic construct
  source 1..21: mol_type = other RNA
aggcgacccaactcccccttt

SEQ ID NO: 5988 - RNA, 21 nt, synthetic construct
  source 1..21: mol_type = other RNA
aggcggagcgagccaaaggcg

SEQ ID NO: 5989 - RNA, 21 nt, synthetic construct
  source 1..21: mol_type = other RNA
aggcggcaggactcgagttag

SEQ ID NO: 5990 - RNA, 21 nt, synthetic construct
  source 1..21: mol_type = other RNA
aggcggccccggcggcttccg

SEQ ID NO: 5991 - RNA, 21 nt, synthetic construct
  source 1..21: mol_type = other RNA
aggcggcgaggggggtgagaa

SEQ ID NO: 5992 - RNA, 21 nt, synthetic construct
  source 1..21: mol_type = other RNA
aggcggcgggtaaaccgactc

SEQ ID NO: 5993 - RNA, 21 nt, synthetic construct
  source 1..21: mol_type = other RNA
aggcgggagggaggcccgccc

SEQ ID NO: 5994 - RNA, 21 nt, synthetic construct
  source 1..21: mol_type = other RNA
aggcgggcgttggtacggtcc

SEQ ID NO: 5995 - RNA, 21 nt, synthetic construct
  source 1..21: mol_type = other RNA
aggcgggggcgggctgccggc

SEQ ID NO: 5996 - RNA, 21 nt, synthetic construct
  source 1..21: mol_type = other RNA
aggcgtccaggaagattacgg

SEQ ID NO: 5997 - RNA, 21 nt, synthetic construct
  source 1..21: mol_type = other RNA
aggcgttgggggaggggaagc

SEQ ID NO: 5998 - RNA, 21 nt, synthetic construct
  source 1..21: mol_type = other RNA
aggctagccggaagcgctcct

SEQ ID NO: 5999 - RNA, 21 nt, synthetic construct
  source 1..21: mol_type = other RNA
aggctatctcagacacgctgt

SEQ ID NO: 6000 - RNA, 21 nt, synthetic construct
  source 1..21: mol_type = other RNA
aggctcgaaccctacacattc

SEQ ID NO: 6001 - RNA, 21 nt, synthetic construct
  source 1..21: mol_type = other RNA
aggctctctgaggagccggag

SEQ ID NO: 6002 - RNA, 21 nt, synthetic construct
  source 1..21: mol_type = other RNA
aggctgtgcttcggcgctccg

SEQ ID NO: 6003 - RNA, 21 nt, synthetic construct
  source 1..21: mol_type = other RNA
agggaaagagaattcataaag

SEQ ID NO: 6004 - RNA, 21 nt, synthetic construct
  source 1..21: mol_type = other RNA
agggaaagaggggggccggca

SEQ ID NO: 6005 - RNA, 21 nt, synthetic construct
  source 1..21: mol_type = other RNA
agggaaaggggtggctggatg

SEQ ID NO: 6006 - RNA, 21 nt, synthetic construct
  source 1..21: mol_type = other RNA
agggaaaggtaaacgtggagt

SEQ ID NO: 6007 - RNA, 21 nt, synthetic construct
  source 1..21: mol_type = other RNA
agggaaagttaaactgttggg

SEQ ID NO: 6008 - RNA, 21 nt, synthetic construct
  source 1..21: mol_type = other RNA
agggaaggcgtccaggaagat

SEQ ID NO: 6009 - RNA, 21 nt, synthetic construct
  source 1..21: mol_type = other RNA
agggaagggtcacctcctccg

SEQ ID NO: 6010 - RNA, 21 nt, synthetic construct
  source 1..21: mol_type = other RNA
agggaatatttttctgccttt

SEQ ID NO: 6011 - RNA, 21 nt, synthetic construct
  source 1..21: mol_type = other RNA
agggagaagggagcggaaaat

SEQ ID NO: 6012 - RNA, 21 nt, synthetic construct
  source 1..21: mol_type = other RNA
agggagagagatccccctcta

SEQ ID NO: 6013 - RNA, 21 nt, synthetic construct
  source 1..21: mol_type = other RNA
agggagcggaaaatgctcgaa

SEQ ID NO: 6014 - RNA, 21 nt, synthetic construct
  source 1..21: mol_type = other RNA
agggaggagcgcttccggcta

SEQ ID NO: 6015 - RNA, 21 nt, synthetic construct
  source 1..21: mol_type = other RNA
agggaggcccgccctgcggca

SEQ ID NO: 6016 - RNA, 21 nt, synthetic construct
  source 1..21: mol_type = other RNA
agggagtgggggatcggggag

SEQ ID NO: 6017 - RNA, 21 nt, synthetic construct
  source 1..21: mol_type = other RNA
agggcagcaagaggcctctcc

SEQ ID NO: 6018 - RNA, 21 nt, synthetic construct
  source 1..21: mol_type = other RNA
agggccaggcccacgacccaa

SEQ ID NO: 6019 - RNA, 21 nt, synthetic construct
  source 1..21: mol_type = other RNA
agggccagggaaagagggggg

SEQ ID NO: 6020 - RNA, 21 nt, synthetic construct
  source 1..21: mol_type = other RNA
agggcccggtcccacagcttc

SEQ ID NO: 6021 - RNA, 21 nt, synthetic construct
  source 1..21: mol_type = other RNA
agggcgagacaagcccgacct

SEQ ID NO: 6022 - RNA, 21 nt, synthetic construct
  source 1..21: mol_type = other RNA
agggcgggcctccctcccgcc

SEQ ID NO: 6023 - RNA, 21 nt, synthetic construct
  source 1..21: mol_type = other RNA
agggctctttcctacactcct

SEQ ID NO: 6024 - RNA, 21 nt, synthetic construct
  source 1..21: mol_type = other RNA
aggggaagcgtcctgacccag

SEQ ID NO: 6025 - RNA, 21 nt, synthetic construct
  source 1..21: mol_type = other RNA
aggggagatcgcggcccccag

SEQ ID NO: 6026 - RNA, 21 nt, synthetic construct
  source 1..21: mol_type = other RNA
aggggagcggaactctggtgg

SEQ ID NO: 6027 - RNA, 21 nt, synthetic construct
  source 1..21: mol_type = other RNA
aggggagggaagggtcacctc

SEQ ID NO: 6028 - RNA, 21 nt, synthetic construct
  source 1..21: mol_type = other RNA
aggggagggtcagtgaaatcg

SEQ ID NO: 6029 - RNA, 21 nt, synthetic construct
  source 1..21: mol_type = other RNA
aggggagggtgggaggacgcc

SEQ ID NO: 6030 - RNA, 21 nt, synthetic construct
  source 1..21: mol_type = other RNA
aggggaggtgcggtacactgg

SEQ ID NO: 6031 - RNA, 21 nt, synthetic construct
  source 1..21: mol_type = other RNA
aggggcgcggggccagacact

SEQ ID NO: 6032 - RNA, 21 nt, synthetic construct
  source 1..21: mol_type = other RNA
aggggctttcccaacagttta

SEQ ID NO: 6033 - RNA, 21 nt, synthetic construct
  source 1..21: mol_type = other RNA
agggggagggagaagggagcg

SEQ ID NO: 6034 - RNA, 21 nt, synthetic construct
  source 1..21: mol_type = other RNA
agggggagttgggtcgcctag

SEQ ID NO: 6035 - RNA, 21 nt, synthetic construct
  source 1..21: mol_type = other RNA
agggggatctctctccctggg

SEQ ID NO: 6036 - RNA, 21 nt, synthetic construct
  source 1..21: mol_type = other RNA
agggggcaacgcgagagtcgc

SEQ ID NO: 6037 - RNA, 21 nt, synthetic construct
  source 1..21: mol_type = other RNA
aggggggccggcactactgtg

SEQ ID NO: 6038 - RNA, 21 nt, synthetic construct
  source 1..21: mol_type = other RNA
aggggggccgtctggtggctt

SEQ ID NO: 6039 - RNA, 21 nt, synthetic construct
  source 1..21: mol_type = other RNA
aggggggtgagaagtggcagc

SEQ ID NO: 6040 - RNA, 21 nt, synthetic construct
  source 1..21: mol_type = other RNA
agggggtgaagaggcgttggg

SEQ ID NO: 6041 - RNA, 21 nt, synthetic construct
  source 1..21: mol_type = other RNA
aggggtggctggatgcaggcg

SEQ ID NO: 6042 - RNA, 21 nt, synthetic construct
  source 1..21: mol_type = other RNA
agggtcacctcctccgtctcc

SEQ ID NO: 6043 - RNA, 21 nt, synthetic construct
  source 1..21: mol_type = other RNA
agggtcagtgaaatcggctct

SEQ ID NO: 6044 - RNA, 21 nt, synthetic construct
  source 1..21: mol_type = other RNA
agggtccgacagaaaagagac

SEQ ID NO: 6045 - RNA, 21 nt, synthetic construct
  source 1..21: mol_type = other RNA
agggtgggaggacgcccgcgc

SEQ ID NO: 6046 - RNA, 21 nt, synthetic construct
  source 1..21: mol_type = other RNA
agggttcgagcctggagttga

SEQ ID NO: 6047 - RNA, 21 nt, synthetic construct
  source 1..21: mol_type = other RNA
aggtaaacgtggagtaggcag

SEQ ID NO: 6048 - RNA, 21 nt, synthetic construct
  source 1..21: mol_type = other RNA
aggtaaatcgcatgagaggga

SEQ ID NO: 6049 - RNA, 21 nt, synthetic construct
  source 1..21: mol_type = other RNA
aggtaagggtccgacagaaaa

SEQ ID NO: 6050 - RNA, 21 nt, synthetic construct
  source 1..21: mol_type = other RNA
aggtaatgcctttgggaagca

SEQ ID NO: 6051 - RNA, 21 nt, synthetic construct
  source 1..21: mol_type = other RNA
aggtaggggagcggaactctg

SEQ ID NO: 6052 - RNA, 21 nt, synthetic construct
  source 1..21: mol_type = other RNA
aggtaggtggggtgtagagat

SEQ ID NO: 6053 - RNA, 21 nt, synthetic construct
  source 1..21: mol_type = other RNA
aggtcgggcttgtctcgccct

SEQ ID NO: 6054 - RNA, 21 nt, synthetic construct
  source 1..21: mol_type = other RNA
aggtgacccttccctcccctg

SEQ ID NO: 6055 - RNA, 21 nt, synthetic construct
  source 1..21: mol_type = other RNA
aggtgcggtacactgggggga

SEQ ID NO: 6056 - RNA, 21 nt, synthetic construct
  source 1..21: mol_type = other RNA
aggtgggaagccagaaaacga

SEQ ID NO: 6057 - RNA, 21 nt, synthetic construct
  source 1..21: mol_type = other RNA
aggtgggggtggggggcagaa

SEQ ID NO: 6058 - RNA, 21 nt, synthetic construct
  source 1..21: mol_type = other RNA
aggtggggtgtagagatgctg

SEQ ID NO: 6059 - RNA, 21 nt, synthetic construct
  source 1..21: mol_type = other RNA
aggtgtcgaagacaagcaggc

SEQ ID NO: 6060 - RNA, 21 nt, synthetic construct
  source 1..21: mol_type = other RNA
aggttcggtctcttttctgtc

SEQ ID NO: 6061 - RNA, 21 nt, synthetic construct
  source 1..21: mol_type = other RNA
agtaaaacgacacaatctggc

SEQ ID NO: 6062 - RNA, 21 nt, synthetic construct
  source 1..21: mol_type = other RNA
agtaaagctcctgtcagttac

SEQ ID NO: 6063 - RNA, 21 nt, synthetic construct
  source 1..21: mol_type = other RNA
agtacgcagccgcttagcgac

SEQ ID NO: 6064 - RNA, 21 nt, synthetic construct
  source 1..21: mol_type = other RNA
agtagcaagggcccggtccca

SEQ ID NO: 6065 - RNA, 21 nt, synthetic construct
  source 1..21: mol_type = other RNA
agtaggcagttcccaggaaag

SEQ ID NO: 6066 - RNA, 21 nt, synthetic construct
  source 1..21: mol_type = other RNA
agtaggtaaatcgcatgagag

SEQ ID NO: 6067 - RNA, 21 nt, synthetic construct
  source 1..21: mol_type = other RNA
agtagtgccggcccccctctt

SEQ ID NO: 6068 - RNA, 21 nt, synthetic construct
  source 1..21: mol_type = other RNA
agtatgcctgtgtatttcgag

SEQ ID NO: 6069 - RNA, 21 nt, synthetic construct
  source 1..21: mol_type = other RNA
agtcccgccagtccgccaaca

SEQ ID NO: 6070 - RNA, 21 nt, synthetic construct
  source 1..21: mol_type = other RNA
agtccgccaacacagtagtgc

SEQ ID NO: 6071 - RNA, 21 nt, synthetic construct
  source 1..21: mol_type = other RNA
agtcctgccgcctcccgggag

SEQ ID NO: 6072 - RNA, 21 nt, synthetic construct
  source 1..21: mol_type = other RNA
agtccttgcttgtctcacttc

SEQ ID NO: 6073 - RNA, 21 nt, synthetic construct
  source 1..21: mol_type = other RNA
agtcgctaagcggctgcgtac

SEQ ID NO: 6074 - RNA, 21 nt, synthetic construct
  source 1..21: mol_type = other RNA
agtcgggaacataatgtttgt

SEQ ID NO: 6075 - RNA, 21 nt, synthetic construct
  source 1..21: mol_type = other RNA
agtcgggaatgtgaagaggag

SEQ ID NO: 6076 - RNA, 21 nt, synthetic construct
  source 1..21: mol_type = other RNA
agtcggtttacccgccgcctg

SEQ ID NO: 6077 - RNA, 21 nt, synthetic construct
  source 1..21: mol_type = other RNA
agtctcacatgagcgaaacca

SEQ ID NO: 6078 - RNA, 21 nt, synthetic construct
  source 1..21: mol_type = other RNA
agtctctgagcgcaggcgggc

SEQ ID NO: 6079 - RNA, 21 nt, synthetic construct
  source 1..21: mol_type = other RNA
agtgaaatcggctctggcgcg

SEQ ID NO: 6080 - RNA, 21 nt, synthetic construct
  source 1..21: mol_type = other RNA
agtgagacaagcaaggactct

SEQ ID NO: 6081 - RNA, 21 nt, synthetic construct
  source 1..21: mol_type = other RNA
agtgccggcccccctctttcc

SEQ ID NO: 6082 - RNA, 21 nt, synthetic construct
  source 1..21: mol_type = other RNA
agtgcctgtagcaggtcgggc

SEQ ID NO: 6083 - RNA, 21 nt, synthetic construct
  source 1..21: mol_type = other RNA
agtggcagcatcctcctaaga

SEQ ID NO: 6084 - RNA, 21 nt, synthetic construct
  source 1..21: mol_type = other RNA
agtggcgtttccgctcgggca

SEQ ID NO: 6085 - RNA, 21 nt, synthetic construct
  source 1..21: mol_type = other RNA
agtgggccaatgggtgcgggg

SEQ ID NO: 6086 - RNA, 21 nt, synthetic construct
  source 1..21: mol_type = other RNA
agtggtctttctcttggatat

SEQ ID NO: 6087 - RNA, 21 nt, synthetic construct
  source 1..21: mol_type = other RNA
agtggtttcgctcatgtgaga

SEQ ID NO: 6088 - RNA, 21 nt, synthetic construct
  source 1..21: mol_type = other RNA
agtgtaccgcacctcccctcc

SEQ ID NO: 6089 - RNA, 21 nt, synthetic construct
  source 1..21: mol_type = other RNA
agtgtaggaaagagccctggt

SEQ ID NO: 6090 - RNA, 21 nt, synthetic construct
  source 1..21: mol_type = other RNA
agtgtctggccccgcgcccct

SEQ ID NO: 6091 - RNA, 21 nt, synthetic construct
  source 1..21: mol_type = other RNA
agttaaactgttgggaaagcc

SEQ ID NO: 6092 - RNA, 21 nt, synthetic construct
  source 1..21: mol_type = other RNA
agttacgccgtcgggagtacg

SEQ ID NO: 6093 - RNA, 21 nt, synthetic construct
  source 1..21: mol_type = other RNA
agttaggcccaacgcggcgcc

SEQ ID NO: 6094 - RNA, 21 nt, synthetic construct
  source 1..21: mol_type = other RNA
agttcccaggaaagggggtga

SEQ ID NO: 6095 - RNA, 21 nt, synthetic construct
  source 1..21: mol_type = other RNA
agttccgctcccctacctagc

SEQ ID NO: 6096 - RNA, 21 nt, synthetic construct
  source 1..21: mol_type = other RNA
agttgagccagattgtgtcgt

SEQ ID NO: 6097 - RNA, 21 nt, synthetic construct
  source 1..21: mol_type = other RNA
agttgggtcgcctagattaga

SEQ ID NO: 6098 - RNA, 21 nt, synthetic construct
  source 1..21: mol_type = other RNA
agttgtctgtcacaaggccgc

SEQ ID NO: 6099 - RNA, 21 nt, synthetic construct
  source 1..21: mol_type = other RNA
agtttaactttccctctcatg

SEQ ID NO: 6100 - RNA, 21 nt, synthetic construct
  source 1..21: mol_type = other RNA
ataaagggaatatttttctgc

SEQ ID NO: 6101 - RNA, 21 nt, synthetic construct
  source 1..21: mol_type = other RNA
ataatgtttgttacgttggga

SEQ ID NO: 6102 - RNA, 21 nt, synthetic construct
  source 1..21: mol_type = other RNA
atacgccatttgtgttttcac

SEQ ID NO: 6103 - RNA, 21 nt, synthetic construct
  source 1..21: mol_type = other RNA
atagaaggggctttcccaaca

SEQ ID NO: 6104 - RNA, 21 nt, synthetic construct
  source 1..21: mol_type = other RNA
atagaatcaattagcatagaa

SEQ ID NO: 6105 - RNA, 21 nt, synthetic construct
  source 1..21: mol_type = other RNA
atagagtccttgcttgtctca

SEQ ID NO: 6106 - RNA, 21 nt, synthetic construct
  source 1..21: mol_type = other RNA
atagcctcgttgaatgtgtag

SEQ ID NO: 6107 - RNA, 21 nt, synthetic construct
  source 1..21: mol_type = other RNA
atatccaagagaaagaccact

SEQ ID NO: 6108 - RNA, 21 nt, synthetic construct
  source 1..21: mol_type = other RNA
atatcttcaaaggcagaaaaa

SEQ ID NO: 6109 - RNA, 21 nt, synthetic construct
  source 1..21: mol_type = other RNA
atattccctttatgaattctc

SEQ ID NO: 6110 - RNA, 21 nt, synthetic construct
  source 1..21: mol_type = other RNA
atattctcacaagatcgttct

SEQ ID NO: 6111 - RNA, 21 nt, synthetic construct
  source 1..21: mol_type = other RNA
atatttttctgcctttgaaga

SEQ ID NO: 6112 - RNA, 21 nt, synthetic construct
  source 1..21: mol_type = other RNA
atcaattagcatagaaggggc

SEQ ID NO: 6113 - RNA, 21 nt, synthetic construct
  source 1..21: mol_type = other RNA
atcagagttgtctgtcacaag

SEQ ID NO: 6114 - RNA, 21 nt, synthetic construct
  source 1..21: mol_type = other RNA
atcagcggaagccgccggggc

SEQ ID NO: 6115 - RNA, 21 nt, synthetic construct
  source 1..21: mol_type = other RNA
atcaggtgtcgaagacaagca

SEQ ID NO: 6116 - RNA, 21 nt, synthetic construct
  source 1..21: mol_type = other RNA
atccaagagaaagaccactga

SEQ ID NO: 6117 - RNA, 21 nt, synthetic construct
  source 1..21: mol_type = other RNA
atccagaagtctcggccggca

SEQ ID NO: 6118 - RNA, 21 nt, synthetic construct
  source 1..21: mol_type = other RNA
atccagccacccctttccctc

SEQ ID NO: 6119 - RNA, 21 nt, synthetic construct
  source 1..21: mol_type = other RNA
atccatatccaagagaaagac

SEQ ID NO: 6120 - RNA, 21 nt, synthetic construct
  source 1..21: mol_type = other RNA
atcccccactccctacccccg

SEQ ID NO: 6121 - RNA, 21 nt, synthetic construct
  source 1..21: mol_type = other RNA
atccccccagtgtaccgcacc

SEQ ID NO: 6122 - RNA, 21 nt, synthetic construct
  source 1..21: mol_type = other RNA
atccccctctaatctaggcga

SEQ ID NO: 6123 - RNA, 21 nt, synthetic construct
  source 1..21: mol_type = other RNA
atccccgtgcggtcagtggcg

SEQ ID NO: 6124 - RNA, 21 nt, synthetic construct
  source 1..21: mol_type = other RNA
atcctcctaagagcttgggga

SEQ ID NO: 6125 - RNA, 21 nt, synthetic construct
  source 1..21: mol_type = other RNA
atcgcatgagagggaaagtta

SEQ ID NO: 6126 - RNA, 21 nt, synthetic construct
  source 1..21: mol_type = other RNA
atcgcggcccccagagcgatc

SEQ ID NO: 6127 - RNA, 21 nt, synthetic construct
  source 1..21: mol_type = other RNA
atcgctctgggggccgcgatc

SEQ ID NO: 6128 - RNA, 21 nt, synthetic construct
  source 1..21: mol_type = other RNA
atcggcgacaagaggctagcc

SEQ ID NO: 6129 - RNA, 21 nt, synthetic construct
  source 1..21: mol_type = other RNA
atcggctctggcgcgggcgtc

SEQ ID NO: 6130 - RNA, 21 nt, synthetic construct
  source 1..21: mol_type = other RNA
atcgggccccaggggagggaa

SEQ ID NO: 6131 - RNA, 21 nt, synthetic construct
  source 1..21: mol_type = other RNA
atcgtgaggttcggtctcttt

SEQ ID NO: 6132 - RNA, 21 nt, synthetic construct
  source 1..21: mol_type = other RNA
atcgttctccacgcccaaggc

SEQ ID NO: 6133 - RNA, 21 nt, synthetic construct
  source 1..21: mol_type = other RNA
atctaggcgacccaactcccc

SEQ ID NO: 6134 - RNA, 21 nt, synthetic construct
  source 1..21: mol_type = other RNA
atctcagacacgctgtggcac

SEQ ID NO: 6135 - RNA, 21 nt, synthetic construct
  source 1..21: mol_type = other RNA
atctcccctccgtaatcttcc

SEQ ID NO: 6136 - RNA, 21 nt, synthetic construct
  source 1..21: mol_type = other RNA
atctctacaccccacctacct

SEQ ID NO: 6137 - RNA, 21 nt, synthetic construct
  source 1..21: mol_type = other RNA
atctctctccctgggaaaatg

SEQ ID NO: 6138 - RNA, 21 nt, synthetic construct
  source 1..21: mol_type = other RNA
atctgaggtgggaagccagaa

SEQ ID NO: 6139 - RNA, 21 nt, synthetic construct
  source 1..21: mol_type = other RNA
atctggctcaactccaggctc

SEQ ID NO: 6140 - RNA, 21 nt, synthetic construct
  source 1..21: mol_type = other RNA
atcttcaaaggcagaaaaata

SEQ ID NO: 6141 - RNA, 21 nt, synthetic construct
  source 1..21: mol_type = other RNA
atcttcctggacgccttccct

SEQ ID NO: 6142 - RNA, 21 nt, synthetic construct
  source 1..21: mol_type = other RNA
atcttgtgagaatatcttcaa

SEQ ID NO: 6143 - RNA, 21 nt, synthetic construct
  source 1..21: mol_type = other RNA
atgaaagggggagttgggtcg

SEQ ID NO: 6144 - RNA, 21 nt, synthetic construct
  source 1..21: mol_type = other RNA
atgaattctctttccctctgc

SEQ ID NO: 6145 - RNA, 21 nt, synthetic construct
  source 1..21: mol_type = other RNA
atgagagggaaagttaaactg

SEQ ID NO: 6146 - RNA, 21 nt, synthetic construct
  source 1..21: mol_type = other RNA
atgagcgaaaccactgcgcgg

SEQ ID NO: 6147 - RNA, 21 nt, synthetic construct
  source 1..21: mol_type = other RNA
atgcaggcgggagggaggccc

SEQ ID NO: 6148 - RNA, 21 nt, synthetic construct
  source 1..21: mol_type = other RNA
atgcctgtgtatttcgagcgg

SEQ ID NO: 6149 - RNA, 21 nt, synthetic construct
  source 1..21: mol_type = other RNA
atgcctttgggaagcagccat

SEQ ID NO: 6150 - RNA, 21 nt, synthetic construct
  source 1..21: mol_type = other RNA
atgcgatttacctacttgaac

SEQ ID NO: 6151 - RNA, 21 nt, synthetic construct
  source 1..21: mol_type = other RNA
atgctaattgattctatagag

SEQ ID NO: 6152 - RNA, 21 nt, synthetic construct
  source 1..21: mol_type = other RNA
atgctcgaaaccggacggagc

SEQ ID NO: 6153 - RNA, 21 nt, synthetic construct
  source 1..21: mol_type = other RNA
atgctgccacttctcaccccc

SEQ ID NO: 6154 - RNA, 21 nt, synthetic construct
  source 1..21: mol_type = other RNA
atgctgggtgtgcgggcgcgg

SEQ ID NO: 6155 - RNA, 21 nt, synthetic construct
  source 1..21: mol_type = other RNA
atggcccgtacccgtgaggtg

SEQ ID NO: 6156 - RNA, 21 nt, synthetic construct
  source 1..21: mol_type = other RNA
atggcgtattctggttggagt

SEQ ID NO: 6157 - RNA, 21 nt, synthetic construct
  source 1..21: mol_type = other RNA
atggctccgtccggtttcgag

SEQ ID NO: 6158 - RNA, 21 nt, synthetic construct
  source 1..21: mol_type = other RNA
atggctgcttcccaaaggcat

SEQ ID NO: 6159 - RNA, 21 nt, synthetic construct
  source 1..21: mol_type = other RNA
atggggtgttgcaacggtgtg

SEQ ID NO: 6160 - RNA, 21 nt, synthetic construct
  source 1..21: mol_type = other RNA
atgggtgcggggcggtgggcg

SEQ ID NO: 6161 - RNA, 21 nt, synthetic construct
  source 1..21: mol_type = other RNA
atgggtggctaggggggccgt

SEQ ID NO: 6162 - RNA, 21 nt, synthetic construct
  source 1..21: mol_type = other RNA
atgtgaagaggagtgtaggaa

SEQ ID NO: 6163 - RNA, 21 nt, synthetic construct
  source 1..21: mol_type = other RNA
atgtgagactcgagccagtag

SEQ ID NO: 6164 - RNA, 21 nt, synthetic construct
  source 1..21: mol_type = other RNA
atgtgtagggttcgagcctgg

SEQ ID NO: 6165 - RNA, 21 nt, synthetic construct
  source 1..21: mol_type = other RNA
atgttcccgacttcccacggg

SEQ ID NO: 6166 - RNA, 21 nt, synthetic construct
  source 1..21: mol_type = other RNA
atgtttgttacgttgggaggg

SEQ ID NO: 6167 - RNA, 21 nt, synthetic construct
  source 1..21: mol_type = other RNA
atgtttttcctgggtcaggac

SEQ ID NO: 6168 - RNA, 21 nt, synthetic construct
  source 1..21: mol_type = other RNA
attaccttcgccacccccacc

SEQ ID NO: 6169 - RNA, 21 nt, synthetic construct
  source 1..21: mol_type = other RNA
attacggaggggagatcgcgg

SEQ ID NO: 6170 - RNA, 21 nt, synthetic construct
  source 1..21: mol_type = other RNA
attagagggggatctctctcc

SEQ ID NO: 6171 - RNA, 21 nt, synthetic construct
  source 1..21: mol_type = other RNA
attagcatagaaggggctttc

SEQ ID NO: 6172 - RNA, 21 nt, synthetic construct
  source 1..21: mol_type = other RNA
attatgttcccgacttcccac

SEQ ID NO: 6173 - RNA, 21 nt, synthetic construct
  source 1..21: mol_type = other RNA
attcaacgaggctatctcaga

SEQ ID NO: 6174 - RNA, 21 nt, synthetic construct
  source 1..21: mol_type = other RNA
attcataaagggaatattttt

SEQ ID NO: 6175 - RNA, 21 nt, synthetic construct
  source 1..21: mol_type = other RNA
attcccagcgccggcgccagg

SEQ ID NO: 6176 - RNA, 21 nt, synthetic construct
  source 1..21: mol_type = other RNA
attcccgacttacacgcagag

SEQ ID NO: 6177 - RNA, 21 nt, synthetic construct
  source 1..21: mol_type = other RNA
attcccggccaggaaacgccg

SEQ ID NO: 6178 - RNA, 21 nt, synthetic construct
  source 1..21: mol_type = other RNA
attccctttatgaattctctt

SEQ ID NO: 6179 - RNA, 21 nt, synthetic construct
  source 1..21: mol_type = other RNA
attctatagagtccttgcttg

SEQ ID NO: 6180 - RNA, 21 nt, synthetic construct
  source 1..21: mol_type = other RNA
attctcacaagatcgttctcc

SEQ ID NO: 6181 - RNA, 21 nt, synthetic construct
  source 1..21: mol_type = other RNA
attctctttccctctgcgtgt

SEQ ID NO: 6182 - RNA, 21 nt, synthetic construct
  source 1..21: mol_type = other RNA
attctggttggagtaaagctc

SEQ ID NO: 6183 - RNA, 21 nt, synthetic construct
  source 1..21: mol_type = other RNA
attgattctatagagtccttg

SEQ ID NO: 6184 - RNA, 21 nt, synthetic construct
  source 1..21: mol_type = other RNA
attgctctcgcagagggagga

SEQ ID NO: 6185 - RNA, 21 nt, synthetic construct
  source 1..21: mol_type = other RNA
attggcccactcgccgccaat

SEQ ID NO: 6186 - RNA, 21 nt, synthetic construct
  source 1..21: mol_type = other RNA
attggccgtttctcctcccgc

SEQ ID NO: 6187 - RNA, 21 nt, synthetic construct
  source 1..21: mol_type = other RNA
attggcctctccgcccaccgc

SEQ ID NO: 6188 - RNA, 21 nt, synthetic construct
  source 1..21: mol_type = other RNA
attggcggcgagtgggccaat

SEQ ID NO: 6189 - RNA, 21 nt, synthetic construct
  source 1..21: mol_type = other RNA
attggctgtcgaagctgtggg

SEQ ID NO: 6190 - RNA, 21 nt, synthetic construct
  source 1..21: mol_type = other RNA
attgtgtcgttttacttgcct

SEQ ID NO: 6191 - RNA, 21 nt, synthetic construct
  source 1..21: mol_type = other RNA
atttacctacttgaaccaggg

SEQ ID NO: 6192 - RNA, 21 nt, synthetic construct
  source 1..21: mol_type = other RNA
atttcactgaccctcccctcc

SEQ ID NO: 6193 - RNA, 21 nt, synthetic construct
  source 1..21: mol_type = other RNA
atttcgagcggagggcagcaa

SEQ ID NO: 6194 - RNA, 21 nt, synthetic construct
  source 1..21: mol_type = other RNA
atttgtgttttcacacacggc

SEQ ID NO: 6195 - RNA, 21 nt, synthetic construct
  source 1..21: mol_type = other RNA
attttcccagggagagagatc

SEQ ID NO: 6196 - RNA, 21 nt, synthetic construct
  source 1..21: mol_type = other RNA
attttccgctcccttctccct

SEQ ID NO: 6197 - RNA, 21 nt, synthetic construct
  source 1..21: mol_type = other RNA
atttttctgcctttgaagata

SEQ ID NO: 6198 - RNA, 21 nt, synthetic construct
  source 1..21: mol_type = other RNA
caaacattatgttcccgactt

SEQ ID NO: 6199 - RNA, 21 nt, synthetic construct
  source 1..21: mol_type = other RNA
caaaggcagaaaaatattccc

SEQ ID NO: 6200 - RNA, 21 nt, synthetic construct
  source 1..21: mol_type = other RNA
caaaggcattaccttcgccac

SEQ ID NO: 6201 - RNA, 21 nt, synthetic construct
  source 1..21: mol_type = other RNA
caaatggcgtattctggttgg

SEQ ID NO: 6202 - RNA, 21 nt, synthetic construct
  source 1..21: mol_type = other RNA
caacacagtagtgccggcccc

SEQ ID NO: 6203 - RNA, 21 nt, synthetic construct
  source 1..21: mol_type = other RNA
caacaccccattttcccaggg

SEQ ID NO: 6204 - RNA, 21 nt, synthetic construct
  source 1..21: mol_type = other RNA
caacagtttaactttccctct

SEQ ID NO: 6205 - RNA, 21 nt, synthetic construct
  source 1..21: mol_type = other RNA
caaccagaatacgccatttgt

SEQ ID NO: 6206 - RNA, 21 nt, synthetic construct
  source 1..21: mol_type = other RNA
caacccccgcaagccaccaga

SEQ ID NO: 6207 - RNA, 21 nt, synthetic construct
  source 1..21: mol_type = other RNA
caaccggagggggagggagaa

SEQ ID NO: 6208 - RNA, 21 nt, synthetic construct
  source 1..21: mol_type = other RNA
caacgaggctatctcagacac

SEQ ID NO: 6209 - RNA, 21 nt, synthetic construct
  source 1..21: mol_type = other RNA
caacgcctcttcacccccttt

SEQ ID NO: 6210 - RNA, 21 nt, synthetic construct
  source 1..21: mol_type = other RNA
caacgcgagagtcgctaagcg

SEQ ID NO: 6211 - RNA, 21 nt, synthetic construct
  source 1..21: mol_type = other RNA
caacgcggcgccacggcgttt

SEQ ID NO: 6212 - RNA, 21 nt, synthetic construct
  source 1..21: mol_type = other RNA
caacggtgtgtgcaaggcggc

SEQ ID NO: 6213 - RNA, 21 nt, synthetic construct
  source 1..21: mol_type = other RNA
caacgtaacaaacattatgtt

SEQ ID NO: 6214 - RNA, 21 nt, synthetic construct
  source 1..21: mol_type = other RNA
caacgtggcaggaagcgcgcg

SEQ ID NO: 6215 - RNA, 21 nt, synthetic construct
  source 1..21: mol_type = other RNA
caactccaggctcgaacccta

SEQ ID NO: 6216 - RNA, 21 nt, synthetic construct
  source 1..21: mol_type = other RNA
caactccccctttcatgtttt

SEQ ID NO: 6217 - RNA, 21 nt, synthetic construct
  source 1..21: mol_type = other RNA
caactctgatcgctctggggg

SEQ ID NO: 6218 - RNA, 21 nt, synthetic construct
  source 1..21: mol_type = other RNA
caagaagtgagacaagcaagg

SEQ ID NO: 6219 - RNA, 21 nt, synthetic construct
  source 1..21: mol_type = other RNA
caagagaaagaccactgacgc

SEQ ID NO: 6220 - RNA, 21 nt, synthetic construct
  source 1..21: mol_type = other RNA
caagaggcctctcctcaaggg

SEQ ID NO: 6221 - RNA, 21 nt, synthetic construct
  source 1..21: mol_type = other RNA
caagaggctagccggaagcgc

SEQ ID NO: 6222 - RNA, 21 nt, synthetic construct
  source 1..21: mol_type = other RNA
caagatcgttctccacgccca

SEQ ID NO: 6223 - RNA, 21 nt, synthetic construct
  source 1..21: mol_type = other RNA
caagcaaggactctatagaat

SEQ ID NO: 6224 - RNA, 21 nt, synthetic construct
  source 1..21: mol_type = other RNA
caagcaggcggcgggtaaacc

SEQ ID NO: 6225 - RNA, 21 nt, synthetic construct
  source 1..21: mol_type = other RNA
caagccaccagacggcccccc

SEQ ID NO: 6226 - RNA, 21 nt, synthetic construct
  source 1..21: mol_type = other RNA
caagcccgacctgctacaggc

SEQ ID NO: 6227 - RNA, 21 nt, synthetic construct
  source 1..21: mol_type = other RNA
caagctcttaggaggatgctg

SEQ ID NO: 6228 - RNA, 21 nt, synthetic construct
  source 1..21: mol_type = other RNA
caaggactctatagaatcaat

SEQ ID NO: 6229 - RNA, 21 nt, synthetic construct
  source 1..21: mol_type = other RNA
caaggagagcgagcgcgggga

SEQ ID NO: 6230 - RNA, 21 nt, synthetic construct
  source 1..21: mol_type = other RNA
caaggcaagtaaaacgacaca

SEQ ID NO: 6231 - RNA, 21 nt, synthetic construct
  source 1..21: mol_type = other RNA
caaggccgcgagaacgggggt

SEQ ID NO: 6232 - RNA, 21 nt, synthetic construct
  source 1..21: mol_type = other RNA
caaggcggcgaggggggtgag

SEQ ID NO: 6233 - RNA, 21 nt, synthetic construct
  source 1..21: mol_type = other RNA
caagggaaaggtaaacgtgga

SEQ ID NO: 6234 - RNA, 21 nt, synthetic construct
  source 1..21: mol_type = other RNA
caagggcccggtcccacagct

SEQ ID NO: 6235 - RNA, 21 nt, synthetic construct
  source 1..21: mol_type = other RNA
caaggtaagggtccgacagaa

SEQ ID NO: 6236 - RNA, 21 nt, synthetic construct
  source 1..21: mol_type = other RNA
caagtaaaacgacacaatctg

SEQ ID NO: 6237 - RNA, 21 nt, synthetic construct
  source 1..21: mol_type = other RNA
caagtaggtaaatcgcatgag

SEQ ID NO: 6238 - RNA, 21 nt, synthetic construct
  source 1..21: mol_type = other RNA
caatcagcggaagccgccggg

SEQ ID NO: 6239 - RNA, 21 nt, synthetic construct
  source 1..21: mol_type = other RNA
caatcaggtgtcgaagacaag

SEQ ID NO: 6240 - RNA, 21 nt, synthetic construct
  source 1..21: mol_type = other RNA
caatcggcgacaagaggctag

SEQ ID NO: 6241 - RNA, 21 nt, synthetic construct
  source 1..21: mol_type = other RNA
caatctggctcaactccaggc

SEQ ID NO: 6242 - RNA, 21 nt, synthetic construct
  source 1..21: mol_type = other RNA
caatggcgcggcgggaggggg

SEQ ID NO: 6243 - RNA, 21 nt, synthetic construct
  source 1..21: mol_type = other RNA
caatggctccgtccggtttcg

SEQ ID NO: 6244 - RNA, 21 nt, synthetic construct
  source 1..21: mol_type = other RNA
caatgggtgcggggcggtggg

SEQ ID NO: 6245 - RNA, 21 nt, synthetic construct
  source 1..21: mol_type = other RNA
caattagcatagaaggggctt

SEQ ID NO: 6246 - RNA, 21 nt, synthetic construct
  source 1..21: mol_type = other RNA
cacaaatggcgtattctggtt

SEQ ID NO: 6247 - RNA, 21 nt, synthetic construct
  source 1..21: mol_type = other RNA
cacaagatcgttctccacgcc

SEQ ID NO: 6248 - RNA, 21 nt, synthetic construct
  source 1..21: mol_type = other RNA
cacaaggccgcgagaacgggg

SEQ ID NO: 6249 - RNA, 21 nt, synthetic construct
  source 1..21: mol_type = other RNA
cacaatctggctcaactccag

SEQ ID NO: 6250 - RNA, 21 nt, synthetic construct
  source 1..21: mol_type = other RNA
cacacaccgttgcaacacccc

SEQ ID NO: 6251 - RNA, 21 nt, synthetic construct
  source 1..21: mol_type = other RNA
cacacacggcgggaggagaaa

SEQ ID NO: 6252 - RNA, 21 nt, synthetic construct
  source 1..21: mol_type = other RNA
cacacccagcatctctacacc

SEQ ID NO: 6253 - RNA, 21 nt, synthetic construct
  source 1..21: mol_type = other RNA
cacaccgttgcaacaccccat

SEQ ID NO: 6254 - RNA, 21 nt, synthetic construct
  source 1..21: mol_type = other RNA
cacacgccacggggagccaga

SEQ ID NO: 6255 - RNA, 21 nt, synthetic construct
  source 1..21: mol_type = other RNA
cacacggcgggaggagaaacg

SEQ ID NO: 6256 - RNA, 21 nt, synthetic construct
  source 1..21: mol_type = other RNA
cacacgttctctggctccccg

SEQ ID NO: 6257 - RNA, 21 nt, synthetic construct
  source 1..21: mol_type = other RNA
cacagcctcttctctaggcgg

SEQ ID NO: 6258 - RNA, 21 nt, synthetic construct
  source 1..21: mol_type = other RNA
cacagcgtgtctgagatagcc

SEQ ID NO: 6259 - RNA, 21 nt, synthetic construct
  source 1..21: mol_type = other RNA
cacagcttcgacagccaatca

SEQ ID NO: 6260 - RNA, 21 nt, synthetic construct
  source 1..21: mol_type = other RNA
cacagtagtgccggcccccct

SEQ ID NO: 6261 - RNA, 21 nt, synthetic construct
  source 1..21: mol_type = other RNA
cacatgagcgaaaccactgcg

SEQ ID NO: 6262 - RNA, 21 nt, synthetic construct
  source 1..21: mol_type = other RNA
cacattcaacgaggctatctc

SEQ ID NO: 6263 - RNA, 21 nt, synthetic construct
  source 1..21: mol_type = other RNA
cacattcccgacttacacgca

SEQ ID NO: 6264 - RNA, 21 nt, synthetic construct
  source 1..21: mol_type = other RNA
caccacacgttctctggctcc

SEQ ID NO: 6265 - RNA, 21 nt, synthetic construct
  source 1..21: mol_type = other RNA
caccagacggcccccctagcc

SEQ ID NO: 6266 - RNA, 21 nt, synthetic construct
  source 1..21: mol_type = other RNA
caccagagttccgctccccta

SEQ ID NO: 6267 - RNA, 21 nt, synthetic construct
  source 1..21: mol_type = other RNA
cacccagcatctctacacccc

SEQ ID NO: 6268 - RNA, 21 nt, synthetic construct
  source 1..21: mol_type = other RNA
cacccagggggcaacgcgaga

SEQ ID NO: 6269 - RNA, 21 nt, synthetic construct
  source 1..21: mol_type = other RNA
cacccatccccccagtgtacc

SEQ ID NO: 6270 - RNA, 21 nt, synthetic construct
  source 1..21: mol_type = other RNA
cacccattggcccactcgccg

SEQ ID NO: 6271 - RNA, 21 nt, synthetic construct
  source 1..21: mol_type = other RNA
caccccacctacctacccgcc

SEQ ID NO: 6272 - RNA, 21 nt, synthetic construct
  source 1..21: mol_type = other RNA
caccccattttcccagggaga

SEQ ID NO: 6273 - RNA, 21 nt, synthetic construct
  source 1..21: mol_type = other RNA
cacccccaccacacgttctct

SEQ ID NO: 6274 - RNA, 21 nt, synthetic construct
  source 1..21: mol_type = other RNA
cacccccacctcacgggtacg

SEQ ID NO: 6275 - RNA, 21 nt, synthetic construct
  source 1..21: mol_type = other RNA
cacccccacgagtgcctgtag

SEQ ID NO: 6276 - RNA, 21 nt, synthetic construct
  source 1..21: mol_type = other RNA
cacccccctcgccgccttgca

SEQ ID NO: 6277 - RNA, 21 nt, synthetic construct
  source 1..21: mol_type = other RNA
cacccccgcgccccgcgcagt

SEQ ID NO: 6278 - RNA, 21 nt, synthetic construct
  source 1..21: mol_type = other RNA
caccccctttcctgggaactg

SEQ ID NO: 6279 - RNA, 21 nt, synthetic construct
  source 1..21: mol_type = other RNA
cacccctttccctcccaacgt

SEQ ID NO: 6280 - RNA, 21 nt, synthetic construct
  source 1..21: mol_type = other RNA
caccctccccttccttcgggg

SEQ ID NO: 6281 - RNA, 21 nt, synthetic construct
  source 1..21: mol_type = other RNA
caccgccccgcacccattggc

SEQ ID NO: 6282 - RNA, 21 nt, synthetic construct
  source 1..21: mol_type = other RNA
caccgcctgaagggcgagaca

SEQ ID NO: 6283 - RNA, 21 nt, synthetic construct
  source 1..21: mol_type = other RNA
caccgttgcaacaccccattt

SEQ ID NO: 6284 - RNA, 21 nt, synthetic construct
  source 1..21: mol_type = other RNA
cacctacctacccgccccacc

SEQ ID NO: 6285 - RNA, 21 nt, synthetic construct
  source 1..21: mol_type = other RNA
cacctcacgggtacgggccat

SEQ ID NO: 6286 - RNA, 21 nt, synthetic construct
  source 1..21: mol_type = other RNA
cacctcagatggctgcttccc

SEQ ID NO: 6287 - RNA, 21 nt, synthetic construct
  source 1..21: mol_type = other RNA
cacctcccctcccaccagagt

SEQ ID NO: 6288 - RNA, 21 nt, synthetic construct
  source 1..21: mol_type = other RNA
cacctcctccgtctccccgcg

SEQ ID NO: 6289 - RNA, 21 nt, synthetic construct
  source 1..21: mol_type = other RNA
cacctgattggctgtcgaagc

SEQ ID NO: 6290 - RNA, 21 nt, synthetic construct
  source 1..21: mol_type = other RNA
cacgacccaaggagagcgagc

SEQ ID NO: 6291 - RNA, 21 nt, synthetic construct
  source 1..21: mol_type = other RNA
cacgagtgcctgtagcaggtc

SEQ ID NO: 6292 - RNA, 21 nt, synthetic construct
  source 1..21: mol_type = other RNA
cacgatcgggccccaggggag

SEQ ID NO: 6293 - RNA, 21 nt, synthetic construct
  source 1..21: mol_type = other RNA
cacgcagagggaaagagaatt

SEQ ID NO: 6294 - RNA, 21 nt, synthetic construct
  source 1..21: mol_type = other RNA
cacgcagccccagtcccgcca

SEQ ID NO: 6295 - RNA, 21 nt, synthetic construct
  source 1..21: mol_type = other RNA
cacgccacggggagccagaga

SEQ ID NO: 6296 - RNA, 21 nt, synthetic construct
  source 1..21: mol_type = other RNA
cacgcccaaggcaagtaaaac

SEQ ID NO: 6297 - RNA, 21 nt, synthetic construct
  source 1..21: mol_type = other RNA
cacgccccctcccgccgcgcc

SEQ ID NO: 6298 - RNA, 21 nt, synthetic construct
  source 1..21: mol_type = other RNA
cacgctgtggcacacgccacg

SEQ ID NO: 6299 - RNA, 21 nt, synthetic construct
  source 1..21: mol_type = other RNA
cacggcactcccgggaggcgg

SEQ ID NO: 6300 - RNA, 21 nt, synthetic construct
  source 1..21: mol_type = other RNA
cacggcgggaggagaaacggc

SEQ ID NO: 6301 - RNA, 21 nt, synthetic construct
  source 1..21: mol_type = other RNA
cacggcgtttcctggccggga

SEQ ID NO: 6302 - RNA, 21 nt, synthetic construct
  source 1..21: mol_type = other RNA
cacgggaaaggcaacccccgc

SEQ ID NO: 6303 - RNA, 21 nt, synthetic construct
  source 1..21: mol_type = other RNA
cacggggagccagagaacgtg

SEQ ID NO: 6304 - RNA, 21 nt, synthetic construct
  source 1..21: mol_type = other RNA
cacggggattcccagcgccgg

SEQ ID NO: 6305 - RNA, 21 nt, synthetic construct
  source 1..21: mol_type = other RNA
cacgggtacgggccattcccg

SEQ ID NO: 6306 - RNA, 21 nt, synthetic construct
  source 1..21: mol_type = other RNA
cacgttctctggctccccgtg

SEQ ID NO: 6307 - RNA, 21 nt, synthetic construct
  source 1..21: mol_type = other RNA
cacgttgcgcaggggcgcggg

SEQ ID NO: 6308 - RNA, 21 nt, synthetic construct
  source 1..21: mol_type = other RNA
cacgtttacctttcccttgag

SEQ ID NO: 6309 - RNA, 21 nt, synthetic construct
  source 1..21: mol_type = other RNA
cactactgtgttggcggactg

SEQ ID NO: 6310 - RNA, 21 nt, synthetic construct
  source 1..21: mol_type = other RNA
cactcagcccgctgcccgagc

SEQ ID NO: 6311 - RNA, 21 nt, synthetic construct
  source 1..21: mol_type = other RNA
cactcccgggaggcggcagga

SEQ ID NO: 6312 - RNA, 21 nt, synthetic construct
  source 1..21: mol_type = other RNA
cactccctacccccgttctcg

SEQ ID NO: 6313 - RNA, 21 nt, synthetic construct
  source 1..21: mol_type = other RNA
cactcctcttcacattcccga

SEQ ID NO: 6314 - RNA, 21 nt, synthetic construct
  source 1..21: mol_type = other RNA
cactcgccgccaatcagcgga

SEQ ID NO: 6315 - RNA, 21 nt, synthetic construct
  source 1..21: mol_type = other RNA
cactcgtgggggtgggggagg

SEQ ID NO: 6316 - RNA, 21 nt, synthetic construct
  source 1..21: mol_type = other RNA
cactgaccctcccctcccgcc

SEQ ID NO: 6317 - RNA, 21 nt, synthetic construct
  source 1..21: mol_type = other RNA
cactgaccgcacggggattcc

SEQ ID NO: 6318 - RNA, 21 nt, synthetic construct
  source 1..21: mol_type = other RNA
cactgacgcccaagaagtgag

SEQ ID NO: 6319 - RNA, 21 nt, synthetic construct
  source 1..21: mol_type = other RNA
cactgcggcgctcggcctcgg

SEQ ID NO: 6320 - RNA, 21 nt, synthetic construct
  source 1..21: mol_type = other RNA
cactggggggatgggtggcta

SEQ ID NO: 6321 - RNA, 21 nt, synthetic construct
  source 1..21: mol_type = other RNA
cacttctcacccccctcgccg

SEQ ID NO: 6322 - RNA, 21 nt, synthetic construct
  source 1..21: mol_type = other RNA
cacttcttgggcgtcagtggt

SEQ ID NO: 6323 - RNA, 21 nt, synthetic construct
  source 1..21: mol_type = other RNA
cagaaaaatattccctttatg

SEQ ID NO: 6324 - RNA, 21 nt, synthetic construct
  source 1..21: mol_type = other RNA
cagaaaacgagagggaaggcg

SEQ ID NO: 6325 - RNA, 21 nt, synthetic construct
  source 1..21: mol_type = other RNA
cagaaaagagaccgaacctca

SEQ ID NO: 6326 - RNA, 21 nt, synthetic construct
  source 1..21: mol_type = other RNA
cagaaaggcggagcgagccaa

SEQ ID NO: 6327 - RNA, 21 nt, synthetic construct
  source 1..21: mol_type = other RNA
cagaagtctcggccggcagcc

SEQ ID NO: 6328 - RNA, 21 nt, synthetic construct
  source 1..21: mol_type = other RNA
cagaatacgccatttgtgttt

SEQ ID NO: 6329 - RNA, 21 nt, synthetic construct
  source 1..21: mol_type = other RNA
cagacaactctgatcgctctg

SEQ ID NO: 6330 - RNA, 21 nt, synthetic construct
  source 1..21: mol_type = other RNA
cagacacgctgtggcacacgc

SEQ ID NO: 6331 - RNA, 21 nt, synthetic construct
  source 1..21: mol_type = other RNA
cagacactgcggcgctcggcc

SEQ ID NO: 6332 - RNA, 21 nt, synthetic construct
  source 1..21: mol_type = other RNA
cagacggcccccctagccacc

SEQ ID NO: 6333 - RNA, 21 nt, synthetic construct
  source 1..21: mol_type = other RNA
cagagaacgtgtggtgggggt

SEQ ID NO: 6334 - RNA, 21 nt, synthetic construct
  source 1..21: mol_type = other RNA
cagagactcacgcagccccag

SEQ ID NO: 6335 - RNA, 21 nt, synthetic construct
  source 1..21: mol_type = other RNA
cagagagcctcggctaggtag

SEQ ID NO: 6336 - RNA, 21 nt, synthetic construct
  source 1..21: mol_type = other RNA
cagagccgatttcactgaccc

SEQ ID NO: 6337 - RNA, 21 nt, synthetic construct
  source 1..21: mol_type = other RNA
cagagcgatcagagttgtctg

SEQ ID NO: 6338 - RNA, 21 nt, synthetic construct
  source 1..21: mol_type = other RNA
cagagggaaagagaattcata

SEQ ID NO: 6339 - RNA, 21 nt, synthetic construct
  source 1..21: mol_type = other RNA
cagagggaggagcgcttccgg

SEQ ID NO: 6340 - RNA, 21 nt, synthetic construct
  source 1..21: mol_type = other RNA
cagagttccgctcccctacct

SEQ ID NO: 6341 - RNA, 21 nt, synthetic construct
  source 1..21: mol_type = other RNA
cagagttgtctgtcacaaggc

SEQ ID NO: 6342 - RNA, 21 nt, synthetic construct
  source 1..21: mol_type = other RNA
cagatggctgcttcccaaagg

SEQ ID NO: 6343 - RNA, 21 nt, synthetic construct
  source 1..21: mol_type = other RNA
cagattgtgtcgttttacttg

SEQ ID NO: 6344 - RNA, 21 nt, synthetic construct
  source 1..21: mol_type = other RNA
cagcaagaggcctctcctcaa

SEQ ID NO: 6345 - RNA, 21 nt, synthetic construct
  source 1..21: mol_type = other RNA
cagcatccatatccaagagaa

SEQ ID NO: 6346 - RNA, 21 nt, synthetic construct
  source 1..21: mol_type = other RNA
cagcatcctcctaagagcttg

SEQ ID NO: 6347 - RNA, 21 nt, synthetic construct
  source 1..21: mol_type = other RNA
cagcatctctacaccccacct

SEQ ID NO: 6348 - RNA, 21 nt, synthetic construct
  source 1..21: mol_type = other RNA
cagccaatcaggtgtcgaaga

SEQ ID NO: 6349 - RNA, 21 nt, synthetic construct
  source 1..21: mol_type = other RNA
cagccacccctttccctccca

SEQ ID NO: 6350 - RNA, 21 nt, synthetic construct
  source 1..21: mol_type = other RNA
cagccatctgaggtgggaagc

SEQ ID NO: 6351 - RNA, 21 nt, synthetic construct
  source 1..21: mol_type = other RNA
cagccccagtcccgccagtcc

SEQ ID NO: 6352 - RNA, 21 nt, synthetic construct
  source 1..21: mol_type = other RNA
cagcccgctgcccgagcggaa

SEQ ID NO: 6353 - RNA, 21 nt, synthetic construct
  source 1..21: mol_type = other RNA
cagccgcttagcgactctcgc

SEQ ID NO: 6354 - RNA, 21 nt, synthetic construct
  source 1..21: mol_type = other RNA
cagccggaccgacccccgctc

SEQ ID NO: 6355 - RNA, 21 nt, synthetic construct
  source 1..21: mol_type = other RNA
cagcctcttctctaggcggcc

SEQ ID NO: 6356 - RNA, 21 nt, synthetic construct
  source 1..21: mol_type = other RNA
cagcgcctgggacaaggtaag

SEQ ID NO: 6357 - RNA, 21 nt, synthetic construct
  source 1..21: mol_type = other RNA
cagcgcgcgcttcctgccacg

SEQ ID NO: 6358 - RNA, 21 nt, synthetic construct
  source 1..21: mol_type = other RNA
cagcggaagccgccggggccg

SEQ ID NO: 6359 - RNA, 21 nt, synthetic construct
  source 1..21: mol_type = other RNA
cagcgggctgagtgagctgcc

SEQ ID NO: 6360 - RNA, 21 nt, synthetic construct
  source 1..21: mol_type = other RNA
cagcgtgtctgagatagcctc

SEQ ID NO: 6361 - RNA, 21 nt, synthetic construct
  source 1..21: mol_type = other RNA
cagctcactcagcccgctgcc

SEQ ID NO: 6362 - RNA, 21 nt, synthetic construct
  source 1..21: mol_type = other RNA
cagcttcgacagccaatcagg

SEQ ID NO: 6363 - RNA, 21 nt, synthetic construct
  source 1..21: mol_type = other RNA
caggaaaaacatgaaaggggg

SEQ ID NO: 6364 - RNA, 21 nt, synthetic construct
  source 1..21: mol_type = other RNA
caggaaacgccgtggcgccgc

SEQ ID NO: 6365 - RNA, 21 nt, synthetic construct
  source 1..21: mol_type = other RNA
caggaaagggggtgaagaggc

SEQ ID NO: 6366 - RNA, 21 nt, synthetic construct
  source 1..21: mol_type = other RNA
caggaagattacggaggggag

SEQ ID NO: 6367 - RNA, 21 nt, synthetic construct
  source 1..21: mol_type = other RNA
caggacgcttcccctccccca

SEQ ID NO: 6368 - RNA, 21 nt, synthetic construct
  source 1..21: mol_type = other RNA
caggactcgagttaggcccaa

SEQ ID NO: 6369 - RNA, 21 nt, synthetic construct
  source 1..21: mol_type = other RNA
caggagctttactccaaccag

SEQ ID NO: 6370 - RNA, 21 nt, synthetic construct
  source 1..21: mol_type = other RNA
caggcactcgtgggggtgggg

SEQ ID NO: 6371 - RNA, 21 nt, synthetic construct
  source 1..21: mol_type = other RNA
caggcccacgacccaaggaga

SEQ ID NO: 6372 - RNA, 21 nt, synthetic construct
  source 1..21: mol_type = other RNA
caggccccggcagcgcctggg

SEQ ID NO: 6373 - RNA, 21 nt, synthetic construct
  source 1..21: mol_type = other RNA
caggcggcgggtaaaccgact

SEQ ID NO: 6374 - RNA, 21 nt, synthetic construct
  source 1..21: mol_type = other RNA
caggctcgaaccctacacatt

SEQ ID NO: 6375 - RNA, 21 nt, synthetic construct
  source 1..21: mol_type = other RNA
cagggaaagaggggggccggc

SEQ ID NO: 6376 - RNA, 21 nt, synthetic construct
  source 1..21: mol_type = other RNA
cagggagagagatccccctct

SEQ ID NO: 6377 - RNA, 21 nt, synthetic construct
  source 1..21: mol_type = other RNA
cagggccagggaaagaggggg

SEQ ID NO: 6378 - RNA, 21 nt, synthetic construct
  source 1..21: mol_type = other RNA
cagggcgggcctccctcccgc

SEQ ID NO: 6379 - RNA, 21 nt, synthetic construct
  source 1..21: mol_type = other RNA
cagggctctttcctacactcc

SEQ ID NO: 6380 - RNA, 21 nt, synthetic construct
  source 1..21: mol_type = other RNA
caggggagggaagggtcacct

SEQ ID NO: 6381 - RNA, 21 nt, synthetic construct
  source 1..21: mol_type = other RNA
cagggggcaacgcgagagtcg

SEQ ID NO: 6382 - RNA, 21 nt, synthetic construct
  source 1..21: mol_type = other RNA
caggtcgggcttgtctcgccc

SEQ ID NO: 6383 - RNA, 21 nt, synthetic construct
  source 1..21: mol_type = other RNA
caggtgtcgaagacaagcagg

SEQ ID NO: 6384 - RNA, 21 nt, synthetic construct
  source 1..21: mol_type = other RNA
cagtagcaagggcccggtccc

SEQ ID NO: 6385 - RNA, 21 nt, synthetic construct
  source 1..21: mol_type = other RNA
cagtagtgccggcccccctct

SEQ ID NO: 6386 - RNA, 21 nt, synthetic construct
  source 1..21: mol_type = other RNA
cagtcccgccagtccgccaac

SEQ ID NO: 6387 - RNA, 21 nt, synthetic construct
  source 1..21: mol_type = other RNA
cagtccgccaacacagtagtg

SEQ ID NO: 6388 - RNA, 21 nt, synthetic construct
  source 1..21: mol_type = other RNA
cagtgaaatcggctctggcgc

SEQ ID NO: 6389 - RNA, 21 nt, synthetic construct
  source 1..21: mol_type = other RNA
cagtggcgtttccgctcgggc

SEQ ID NO: 6390 - RNA, 21 nt, synthetic construct
  source 1..21: mol_type = other RNA
cagtggtctttctcttggata

SEQ ID NO: 6391 - RNA, 21 nt, synthetic construct
  source 1..21: mol_type = other RNA
cagtggtttcgctcatgtgag

SEQ ID NO: 6392 - RNA, 21 nt, synthetic construct
  source 1..21: mol_type = other RNA
cagtgtaccgcacctcccctc

SEQ ID NO: 6393 - RNA, 21 nt, synthetic construct
  source 1..21: mol_type = other RNA
cagtgtctggccccgcgcccc

SEQ ID NO: 6394 - RNA, 21 nt, synthetic construct
  source 1..21: mol_type = other RNA
cagttacgccgtcgggagtac

SEQ ID NO: 6395 - RNA, 21 nt, synthetic construct
  source 1..21: mol_type = other RNA
cagttcccaggaaagggggtg

SEQ ID NO: 6396 - RNA, 21 nt, synthetic construct
  source 1..21: mol_type = other RNA
cagtttaactttccctctcat

SEQ ID NO: 6397 - RNA, 21 nt, synthetic construct
  source 1..21: mol_type = other RNA
cataaagggaatatttttctg

SEQ ID NO: 6398 - RNA, 21 nt, synthetic construct
  source 1..21: mol_type = other RNA
cataatgtttgttacgttggg

SEQ ID NO: 6399 - RNA, 21 nt, synthetic construct
  source 1..21: mol_type = other RNA
catagaaggggctttcccaac

SEQ ID NO: 6400 - RNA, 21 nt, synthetic construct
  source 1..21: mol_type = other RNA
catatccaagagaaagaccac

SEQ ID NO: 6401 - RNA, 21 nt, synthetic construct
  source 1..21: mol_type = other RNA
catccagaagtctcggccggc

SEQ ID NO: 6402 - RNA, 21 nt, synthetic construct
  source 1..21: mol_type = other RNA
catccagccacccctttccct

SEQ ID NO: 6403 - RNA, 21 nt, synthetic construct
  source 1..21: mol_type = other RNA
catccatatccaagagaaaga

SEQ ID NO: 6404 - RNA, 21 nt, synthetic construct
  source 1..21: mol_type = other RNA
catccccccagtgtaccgcac

SEQ ID NO: 6405 - RNA, 21 nt, synthetic construct
  source 1..21: mol_type = other RNA
catcctcctaagagcttgggg

SEQ ID NO: 6406 - RNA, 21 nt, synthetic construct
  source 1..21: mol_type = other RNA
catctctacaccccacctacc

SEQ ID NO: 6407 - RNA, 21 nt, synthetic construct
  source 1..21: mol_type = other RNA
catctgaggtgggaagccaga

SEQ ID NO: 6408 - RNA, 21 nt, synthetic construct
  source 1..21: mol_type = other RNA
catgaaagggggagttgggtc

SEQ ID NO: 6409 - RNA, 21 nt, synthetic construct
  source 1..21: mol_type = other RNA
catgagagggaaagttaaact

SEQ ID NO: 6410 - RNA, 21 nt, synthetic construct
  source 1..21: mol_type = other RNA
catgagcgaaaccactgcgcg

SEQ ID NO: 6411 - RNA, 21 nt, synthetic construct
  source 1..21: mol_type = other RNA
catgcgatttacctacttgaa

SEQ ID NO: 6412 - RNA, 21 nt, synthetic construct
  source 1..21: mol_type = other RNA
catgtgagactcgagccagta

SEQ ID NO: 6413 - RNA, 21 nt, synthetic construct
  source 1..21: mol_type = other RNA
catgtttttcctgggtcagga

SEQ ID NO: 6414 - RNA, 21 nt, synthetic construct
  source 1..21: mol_type = other RNA
cattaccttcgccacccccac

SEQ ID NO: 6415 - RNA, 21 nt, synthetic construct
  source 1..21: mol_type = other RNA
cattatgttcccgacttccca

SEQ ID NO: 6416 - RNA, 21 nt, synthetic construct
  source 1..21: mol_type = other RNA
cattcaacgaggctatctcag

SEQ ID NO: 6417 - RNA, 21 nt, synthetic construct
  source 1..21: mol_type = other RNA
cattcccgacttacacgcaga

SEQ ID NO: 6418 - RNA, 21 nt, synthetic construct
  source 1..21: mol_type = other RNA
cattcccggccaggaaacgcc

SEQ ID NO: 6419 - RNA, 21 nt, synthetic construct
  source 1..21: mol_type = other RNA
cattgctctcgcagagggagg

SEQ ID NO: 6420 - RNA, 21 nt, synthetic construct
  source 1..21: mol_type = other RNA
cattggcccactcgccgccaa

SEQ ID NO: 6421 - RNA, 21 nt, synthetic construct
  source 1..21: mol_type = other RNA
cattggcctctccgcccaccg

SEQ ID NO: 6422 - RNA, 21 nt, synthetic construct
  source 1..21: mol_type = other RNA
catttgtgttttcacacacgg

SEQ ID NO: 6423 - RNA, 21 nt, synthetic construct
  source 1..21: mol_type = other RNA
cattttcccagggagagagat

SEQ ID NO: 6424 - RNA, 21 nt, synthetic construct
  source 1..21: mol_type = other RNA
cattttccgctcccttctccc

SEQ ID NO: 6425 - RNA, 21 nt, synthetic construct
  source 1..21: mol_type = other RNA
ccaaaggcattaccttcgcca

SEQ ID NO: 6426 - RNA, 21 nt, synthetic construct
  source 1..21: mol_type = other RNA
ccaacacagtagtgccggccc

SEQ ID NO: 6427 - RNA, 21 nt, synthetic construct
  source 1..21: mol_type = other RNA
ccaacagtttaactttccctc

SEQ ID NO: 6428 - RNA, 21 nt, synthetic construct
  source 1..21: mol_type = other RNA
ccaaccagaatacgccatttg

SEQ ID NO: 6429 - RNA, 21 nt, synthetic construct
  source 1..21: mol_type = other RNA
ccaacgcctcttcaccccctt

SEQ ID NO: 6430 - RNA, 21 nt, synthetic construct
  source 1..21: mol_type = other RNA
ccaacgcggcgccacggcgtt

SEQ ID NO: 6431 - RNA, 21 nt, synthetic construct
  source 1..21: mol_type = other RNA
ccaacgtaacaaacattatgt

SEQ ID NO: 6432 - RNA, 21 nt, synthetic construct
  source 1..21: mol_type = other RNA
ccaactccccctttcatgttt

SEQ ID NO: 6433 - RNA, 21 nt, synthetic construct
  source 1..21: mol_type = other RNA
ccaagaagtgagacaagcaag

SEQ ID NO: 6434 - RNA, 21 nt, synthetic construct
  source 1..21: mol_type = other RNA
ccaagagaaagaccactgacg

SEQ ID NO: 6435 - RNA, 21 nt, synthetic construct
  source 1..21: mol_type = other RNA
ccaagctcttaggaggatgct

SEQ ID NO: 6436 - RNA, 21 nt, synthetic construct
  source 1..21: mol_type = other RNA
ccaaggagagcgagcgcgggg

SEQ ID NO: 6437 - RNA, 21 nt, synthetic construct
  source 1..21: mol_type = other RNA
ccaaggcaagtaaaacgacac

SEQ ID NO: 6438 - RNA, 21 nt, synthetic construct
  source 1..21: mol_type = other RNA
ccaatcagcggaagccgccgg

SEQ ID NO: 6439 - RNA, 21 nt, synthetic construct
  source 1..21: mol_type = other RNA
ccaatcaggtgtcgaagacaa

SEQ ID NO: 6440 - RNA, 21 nt, synthetic construct
  source 1..21: mol_type = other RNA
ccaatcggcgacaagaggcta

SEQ ID NO: 6441 - RNA, 21 nt, synthetic construct
  source 1..21: mol_type = other RNA
ccaatggcgcggcgggagggg

SEQ ID NO: 6442 - RNA, 21 nt, synthetic construct
  source 1..21: mol_type = other RNA
ccaatgggtgcggggcggtgg

SEQ ID NO: 6443 - RNA, 21 nt, synthetic construct
  source 1..21: mol_type = other RNA
ccacacgttctctggctcccc

SEQ ID NO: 6444 - RNA, 21 nt, synthetic construct
  source 1..21: mol_type = other RNA
ccacagcgtgtctgagatagc

SEQ ID NO: 6445 - RNA, 21 nt, synthetic construct
  source 1..21: mol_type = other RNA
ccacagcttcgacagccaatc

SEQ ID NO: 6446 - RNA, 21 nt, synthetic construct
  source 1..21: mol_type = other RNA
ccaccacacgttctctggctc

SEQ ID NO: 6447 - RNA, 21 nt, synthetic construct
  source 1..21: mol_type = other RNA
ccaccagacggcccccctagc

SEQ ID NO: 6448 - RNA, 21 nt, synthetic construct
  source 1..21: mol_type = other RNA
ccaccagagttccgctcccct

SEQ ID NO: 6449 - RNA, 21 nt, synthetic construct
  source 1..21: mol_type = other RNA
ccacccagggggcaacgcgag

SEQ ID NO: 6450 - RNA, 21 nt, synthetic construct
  source 1..21: mol_type = other RNA
ccacccatccccccagtgtac

SEQ ID NO: 6451 - RNA, 21 nt, synthetic construct
  source 1..21: mol_type = other RNA
ccacccccaccacacgttctc

SEQ ID NO: 6452 - RNA, 21 nt, synthetic construct
  source 1..21: mol_type = other RNA
ccacccccacctcacgggtac

SEQ ID NO: 6453 - RNA, 21 nt, synthetic construct
  source 1..21: mol_type = other RNA
ccacccccacgagtgcctgta

SEQ ID NO: 6454 - RNA, 21 nt, synthetic construct
  source 1..21: mol_type = other RNA
ccacccccgcgccccgcgcag

SEQ ID NO: 6455 - RNA, 21 nt, synthetic construct
  source 1..21: mol_type = other RNA
ccacccctttccctcccaacg

SEQ ID NO: 6456 - RNA, 21 nt, synthetic construct
  source 1..21: mol_type = other RNA
ccaccctccccttccttcggg

SEQ ID NO: 6457 - RNA, 21 nt, synthetic construct
  source 1..21: mol_type = other RNA
ccaccgccccgcacccattgg

SEQ ID NO: 6458 - RNA, 21 nt, synthetic construct
  source 1..21: mol_type = other RNA
ccaccgcctgaagggcgagac

SEQ ID NO: 6459 - RNA, 21 nt, synthetic construct
  source 1..21: mol_type = other RNA
ccacctacctacccgccccac

SEQ ID NO: 6460 - RNA, 21 nt, synthetic construct
  source 1..21: mol_type = other RNA
ccacctcacgggtacgggcca

SEQ ID NO: 6461 - RNA, 21 nt, synthetic construct
  source 1..21: mol_type = other RNA
ccacctcagatggctgcttcc

SEQ ID NO: 6462 - RNA, 21 nt, synthetic construct
  source 1..21: mol_type = other RNA
ccacgacccaaggagagcgag

SEQ ID NO: 6463 - RNA, 21 nt, synthetic construct
  source 1..21: mol_type = other RNA
ccacgagtgcctgtagcaggt

SEQ ID NO: 6464 - RNA, 21 nt, synthetic construct
  source 1..21: mol_type = other RNA
ccacgcccaaggcaagtaaaa

SEQ ID NO: 6465 - RNA, 21 nt, synthetic construct
  source 1..21: mol_type = other RNA
ccacggcgtttcctggccggg

SEQ ID NO: 6466 - RNA, 21 nt, synthetic construct
  source 1..21: mol_type = other RNA
ccacgggaaaggcaacccccg

SEQ ID NO: 6467 - RNA, 21 nt, synthetic construct
  source 1..21: mol_type = other RNA
ccacggggagccagagaacgt

SEQ ID NO: 6468 - RNA, 21 nt, synthetic construct
  source 1..21: mol_type = other RNA
ccacgttgcgcaggggcgcgg

SEQ ID NO: 6469 - RNA, 21 nt, synthetic construct
  source 1..21: mol_type = other RNA
ccacgtttacctttcccttga

SEQ ID NO: 6470 - RNA, 21 nt, synthetic construct
  source 1..21: mol_type = other RNA
ccactccctacccccgttctc

SEQ ID NO: 6471 - RNA, 21 nt, synthetic construct
  source 1..21: mol_type = other RNA
ccactcgccgccaatcagcgg

SEQ ID NO: 6472 - RNA, 21 nt, synthetic construct
  source 1..21: mol_type = other RNA
ccactgaccgcacggggattc

SEQ ID NO: 6473 - RNA, 21 nt, synthetic construct
  source 1..21: mol_type = other RNA
ccactgacgcccaagaagtga

SEQ ID NO: 6474 - RNA, 21 nt, synthetic construct
  source 1..21: mol_type = other RNA
ccacttctcacccccctcgcc

SEQ ID NO: 6475 - RNA, 21 nt, synthetic construct
  source 1..21: mol_type = other RNA
ccagaaaacgagagggaaggc

SEQ ID NO: 6476 - RNA, 21 nt, synthetic construct
  source 1..21: mol_type = other RNA
ccagaagtctcggccggcagc

SEQ ID NO: 6477 - RNA, 21 nt, synthetic construct
  source 1..21: mol_type = other RNA
ccagaatacgccatttgtgtt

SEQ ID NO: 6478 - RNA, 21 nt, synthetic construct
  source 1..21: mol_type = other RNA
ccagacactgcggcgctcggc

SEQ ID NO: 6479 - RNA, 21 nt, synthetic construct
  source 1..21: mol_type = other RNA
ccagacggcccccctagccac

SEQ ID NO: 6480 - RNA, 21 nt, synthetic construct
  source 1..21: mol_type = other RNA
ccagagaacgtgtggtggggg

SEQ ID NO: 6481 - RNA, 21 nt, synthetic construct
  source 1..21: mol_type = other RNA
ccagagccgatttcactgacc

SEQ ID NO: 6482 - RNA, 21 nt, synthetic construct
  source 1..21: mol_type = other RNA
ccagagcgatcagagttgtct

SEQ ID NO: 6483 - RNA, 21 nt, synthetic construct
  source 1..21: mol_type = other RNA
ccagagttccgctcccctacc

SEQ ID NO: 6484 - RNA, 21 nt, synthetic construct
  source 1..21: mol_type = other RNA
ccagattgtgtcgttttactt

SEQ ID NO: 6485 - RNA, 21 nt, synthetic construct
  source 1..21: mol_type = other RNA
ccagcatctctacaccccacc

SEQ ID NO: 6486 - RNA, 21 nt, synthetic construct
  source 1..21: mol_type = other RNA
ccagccacccctttccctccc

SEQ ID NO: 6487 - RNA, 21 nt, synthetic construct
  source 1..21: mol_type = other RNA
ccagcgcgcgcttcctgccac

SEQ ID NO: 6488 - RNA, 21 nt, synthetic construct
  source 1..21: mol_type = other RNA
ccaggaaaaacatgaaagggg

SEQ ID NO: 6489 - RNA, 21 nt, synthetic construct
  source 1..21: mol_type = other RNA
ccaggaaacgccgtggcgccg

SEQ ID NO: 6490 - RNA, 21 nt, synthetic construct
  source 1..21: mol_type = other RNA
ccaggaaagggggtgaagagg

SEQ ID NO: 6491 - RNA, 21 nt, synthetic construct
  source 1..21: mol_type = other RNA
ccaggaagattacggagggga

SEQ ID NO: 6492 - RNA, 21 nt, synthetic construct
  source 1..21: mol_type = other RNA
ccaggcccacgacccaaggag

SEQ ID NO: 6493 - RNA, 21 nt, synthetic construct
  source 1..21: mol_type = other RNA
ccaggccccggcagcgcctgg

SEQ ID NO: 6494 - RNA, 21 nt, synthetic construct
  source 1..21: mol_type = other RNA
ccaggctcgaaccctacacat

SEQ ID NO: 6495 - RNA, 21 nt, synthetic construct
  source 1..21: mol_type = other RNA
ccagggaaagaggggggccgg

SEQ ID NO: 6496 - RNA, 21 nt, synthetic construct
  source 1..21: mol_type = other RNA
ccagggagagagatccccctc

SEQ ID NO: 6497 - RNA, 21 nt, synthetic construct
  source 1..21: mol_type = other RNA
ccagggctctttcctacactc

SEQ ID NO: 6498 - RNA, 21 nt, synthetic construct
  source 1..21: mol_type = other RNA
ccaggggagggaagggtcacc

SEQ ID NO: 6499 - RNA, 21 nt, synthetic construct
  source 1..21: mol_type = other RNA
ccagggggcaacgcgagagtc

SEQ ID NO: 6500 - RNA, 21 nt, synthetic construct
  source 1..21: mol_type = other RNA
ccagtagcaagggcccggtcc

SEQ ID NO: 6501 - RNA, 21 nt, synthetic construct
  source 1..21: mol_type = other RNA
ccagtcccgccagtccgccaa

SEQ ID NO: 6502 - RNA, 21 nt, synthetic construct
  source 1..21: mol_type = other RNA
ccagtccgccaacacagtagt

SEQ ID NO: 6503 - RNA, 21 nt, synthetic construct
  source 1..21: mol_type = other RNA
ccagtgtaccgcacctcccct

SEQ ID NO: 6504 - RNA, 21 nt, synthetic construct
  source 1..21: mol_type = other RNA
ccatatccaagagaaagacca

SEQ ID NO: 6505 - RNA, 21 nt, synthetic construct
  source 1..21: mol_type = other RNA
ccatccagaagtctcggccgg

SEQ ID NO: 6506 - RNA, 21 nt, synthetic construct
  source 1..21: mol_type = other RNA
ccatccccccagtgtaccgca

SEQ ID NO: 6507 - RNA, 21 nt, synthetic construct
  source 1..21: mol_type = other RNA
ccatctgaggtgggaagccag

SEQ ID NO: 6508 - RNA, 21 nt, synthetic construct
  source 1..21: mol_type = other RNA
ccattcccggccaggaaacgc

SEQ ID NO: 6509 - RNA, 21 nt, synthetic construct
  source 1..21: mol_type = other RNA
ccattgctctcgcagagggag

SEQ ID NO: 6510 - RNA, 21 nt, synthetic construct
  source 1..21: mol_type = other RNA
ccattggcccactcgccgcca

SEQ ID NO: 6511 - RNA, 21 nt, synthetic construct
  source 1..21: mol_type = other RNA
ccattggcctctccgcccacc

SEQ ID NO: 6512 - RNA, 21 nt, synthetic construct
  source 1..21: mol_type = other RNA
ccatttgtgttttcacacacg

SEQ ID NO: 6513 - RNA, 21 nt, synthetic construct
  source 1..21: mol_type = other RNA
ccattttcccagggagagaga

SEQ ID NO: 6514 - RNA, 21 nt, synthetic construct
  source 1..21: mol_type = other RNA
cccaaaggcattaccttcgcc

SEQ ID NO: 6515 - RNA, 21 nt, synthetic construct
  source 1..21: mol_type = other RNA
cccaacagtttaactttccct

SEQ ID NO: 6516 - RNA, 21 nt, synthetic construct
  source 1..21: mol_type = other RNA
cccaacgcctcttcaccccct

SEQ ID NO: 6517 - RNA, 21 nt, synthetic construct
  source 1..21: mol_type = other RNA
cccaacgcggcgccacggcgt

SEQ ID NO: 6518 - RNA, 21 nt, synthetic construct
  source 1..21: mol_type = other RNA
cccaacgtaacaaacattatg

SEQ ID NO: 6519 - RNA, 21 nt, synthetic construct
  source 1..21: mol_type = other RNA
cccaactccccctttcatgtt

SEQ ID NO: 6520 - RNA, 21 nt, synthetic construct
  source 1..21: mol_type = other RNA
cccaagaagtgagacaagcaa

SEQ ID NO: 6521 - RNA, 21 nt, synthetic construct
  source 1..21: mol_type = other RNA
cccaagctcttaggaggatgc

SEQ ID NO: 6522 - RNA, 21 nt, synthetic construct
  source 1..21: mol_type = other RNA
cccaaggagagcgagcgcggg

SEQ ID NO: 6523 - RNA, 21 nt, synthetic construct
  source 1..21: mol_type = other RNA
cccaaggcaagtaaaacgaca

SEQ ID NO: 6524 - RNA, 21 nt, synthetic construct
  source 1..21: mol_type = other RNA
cccacagcttcgacagccaat

SEQ ID NO: 6525 - RNA, 21 nt, synthetic construct
  source 1..21: mol_type = other RNA
cccaccacacgttctctggct

SEQ ID NO: 6526 - RNA, 21 nt, synthetic construct
  source 1..21: mol_type = other RNA
cccaccagagttccgctcccc

SEQ ID NO: 6527 - RNA, 21 nt, synthetic construct
  source 1..21: mol_type = other RNA
cccacccagggggcaacgcga

SEQ ID NO: 6528 - RNA, 21 nt, synthetic construct
  source 1..21: mol_type = other RNA
cccacccccacctcacgggta

SEQ ID NO: 6529 - RNA, 21 nt, synthetic construct
  source 1..21: mol_type = other RNA
cccacccccacgagtgcctgt

SEQ ID NO: 6530 - RNA, 21 nt, synthetic construct
  source 1..21: mol_type = other RNA
cccaccctccccttccttcgg

SEQ ID NO: 6531 - RNA, 21 nt, synthetic construct
  source 1..21: mol_type = other RNA
cccaccgccccgcacccattg

SEQ ID NO: 6532 - RNA, 21 nt, synthetic construct
  source 1..21: mol_type = other RNA
cccaccgcctgaagggcgaga

SEQ ID NO: 6533 - RNA, 21 nt, synthetic construct
  source 1..21: mol_type = other RNA
cccacctacctacccgcccca

SEQ ID NO: 6534 - RNA, 21 nt, synthetic construct
  source 1..21: mol_type = other RNA
cccacctcacgggtacgggcc

SEQ ID NO: 6535 - RNA, 21 nt, synthetic construct
  source 1..21: mol_type = other RNA
cccacctcagatggctgcttc

SEQ ID NO: 6536 - RNA, 21 nt, synthetic construct
  source 1..21: mol_type = other RNA
cccacgacccaaggagagcga

SEQ ID NO: 6537 - RNA, 21 nt, synthetic construct
  source 1..21: mol_type = other RNA
cccacgagtgcctgtagcagg

SEQ ID NO: 6538 - RNA, 21 nt, synthetic construct
  source 1..21: mol_type = other RNA
cccacgggaaaggcaaccccc

SEQ ID NO: 6539 - RNA, 21 nt, synthetic construct
  source 1..21: mol_type = other RNA
cccactccctacccccgttct

SEQ ID NO: 6540 - RNA, 21 nt, synthetic construct
  source 1..21: mol_type = other RNA
cccactcgccgccaatcagcg

SEQ ID NO: 6541 - RNA, 21 nt, synthetic construct
  source 1..21: mol_type = other RNA
cccagagcgatcagagttgtc

SEQ ID NO: 6542 - RNA, 21 nt, synthetic construct
  source 1..21: mol_type = other RNA
cccagcatctctacaccccac

SEQ ID NO: 6543 - RNA, 21 nt, synthetic construct
  source 1..21: mol_type = other RNA
cccaggaaaaacatgaaaggg

SEQ ID NO: 6544 - RNA, 21 nt, synthetic construct
  source 1..21: mol_type = other RNA
cccaggaaagggggtgaagag

SEQ ID NO: 6545 - RNA, 21 nt, synthetic construct
  source 1..21: mol_type = other RNA
cccaggccccggcagcgcctg

SEQ ID NO: 6546 - RNA, 21 nt, synthetic construct
  source 1..21: mol_type = other RNA
cccagggagagagatccccct

SEQ ID NO: 6547 - RNA, 21 nt, synthetic construct
  source 1..21: mol_type = other RNA
cccaggggagggaagggtcac

SEQ ID NO: 6548 - RNA, 21 nt, synthetic construct
  source 1..21: mol_type = other RNA
cccagggggcaacgcgagagt

SEQ ID NO: 6549 - RNA, 21 nt, synthetic construct
  source 1..21: mol_type = other RNA
cccagtcccgccagtccgcca

SEQ ID NO: 6550 - RNA, 21 nt, synthetic construct
  source 1..21: mol_type = other RNA
cccagtgtaccgcacctcccc

SEQ ID NO: 6551 - RNA, 21 nt, synthetic construct
  source 1..21: mol_type = other RNA
cccatccccccagtgtaccgc

SEQ ID NO: 6552 - RNA, 21 nt, synthetic construct
  source 1..21: mol_type = other RNA
cccattggcccactcgccgcc

SEQ ID NO: 6553 - RNA, 21 nt, synthetic construct
  source 1..21: mol_type = other RNA
cccattttcccagggagagag

SEQ ID NO: 6554 - RNA, 21 nt, synthetic construct
  source 1..21: mol_type = other RNA
ccccaacgcctcttcaccccc

SEQ ID NO: 6555 - RNA, 21 nt, synthetic construct
  source 1..21: mol_type = other RNA
ccccaagctcttaggaggatg

SEQ ID NO: 6556 - RNA, 21 nt, synthetic construct
  source 1..21: mol_type = other RNA
ccccaccacacgttctctggc

SEQ ID NO: 6557 - RNA, 21 nt, synthetic construct
  source 1..21: mol_type = other RNA
ccccacccagggggcaacgcg

SEQ ID NO: 6558 - RNA, 21 nt, synthetic construct
  source 1..21: mol_type = other RNA
ccccacccccacctcacgggt

SEQ ID NO: 6559 - RNA, 21 nt, synthetic construct
  source 1..21: mol_type = other RNA
ccccacccccacgagtgcctg

SEQ ID NO: 6560 - RNA, 21 nt, synthetic construct
  source 1..21: mol_type = other RNA
ccccacctacctacccgcccc

SEQ ID NO: 6561 - RNA, 21 nt, synthetic construct
  source 1..21: mol_type = other RNA
ccccacctcacgggtacgggc

SEQ ID NO: 6562 - RNA, 21 nt, synthetic construct
  source 1..21: mol_type = other RNA
ccccacgagtgcctgtagcag

SEQ ID NO: 6563 - RNA, 21 nt, synthetic construct
  source 1..21: mol_type = other RNA
ccccactccctacccccgttc

SEQ ID NO: 6564 - RNA, 21 nt, synthetic construct
  source 1..21: mol_type = other RNA
ccccagagcgatcagagttgt

SEQ ID NO: 6565 - RNA, 21 nt, synthetic construct
  source 1..21: mol_type = other RNA
ccccaggggagggaagggtca

SEQ ID NO: 6566 - RNA, 21 nt, synthetic construct
  source 1..21: mol_type = other RNA
ccccagtcccgccagtccgcc

SEQ ID NO: 6567 - RNA, 21 nt, synthetic construct
  source 1..21: mol_type = other RNA
ccccagtgtaccgcacctccc

SEQ ID NO: 6568 - RNA, 21 nt, synthetic construct
  source 1..21: mol_type = other RNA
ccccattttcccagggagaga

SEQ ID NO: 6569 - RNA, 21 nt, synthetic construct
  source 1..21: mol_type = other RNA
cccccaacgcctcttcacccc

SEQ ID NO: 6570 - RNA, 21 nt, synthetic construct
  source 1..21: mol_type = other RNA
cccccaccacacgttctctgg

SEQ ID NO: 6571 - RNA, 21 nt, synthetic construct
  source 1..21: mol_type = other RNA
cccccacccccacctcacggg

SEQ ID NO: 6572 - RNA, 21 nt, synthetic construct
  source 1..21: mol_type = other RNA
cccccacccccacgagtgcct

SEQ ID NO: 6573 - RNA, 21 nt, synthetic construct
  source 1..21: mol_type = other RNA
cccccacctcacgggtacggg

SEQ ID NO: 6574 - RNA, 21 nt, synthetic construct
  source 1..21: mol_type = other RNA
cccccacgagtgcctgtagca

SEQ ID NO: 6575 - RNA, 21 nt, synthetic construct
  source 1..21: mol_type = other RNA
cccccactccctacccccgtt

SEQ ID NO: 6576 - RNA, 21 nt, synthetic construct
  source 1..21: mol_type = other RNA
cccccagagcgatcagagttg

SEQ ID NO: 6577 - RNA, 21 nt, synthetic construct
  source 1..21: mol_type = other RNA
cccccagtgtaccgcacctcc

SEQ ID NO: 6578 - RNA, 21 nt, synthetic construct
  source 1..21: mol_type = other RNA
ccccccacccccacctcacgg

SEQ ID NO: 6579 - RNA, 21 nt, synthetic construct
  source 1..21: mol_type = other RNA
ccccccagtgtaccgcacctc

SEQ ID NO: 6580 - RNA, 21 nt, synthetic construct
  source 1..21: mol_type = other RNA
cccccctagccacccatcccc

SEQ ID NO: 6581 - RNA, 21 nt, synthetic construct
  source 1..21: mol_type = other RNA
cccccctccccgcctttggct

SEQ ID NO: 6582 - RNA, 21 nt, synthetic construct
  source 1..21: mol_type = other RNA
cccccctcgccgccttgcaca

SEQ ID NO: 6583 - RNA, 21 nt, synthetic construct
  source 1..21: mol_type = other RNA
cccccgaaggaaggggagggt

SEQ ID NO: 6584 - RNA, 21 nt, synthetic construct
  source 1..21: mol_type = other RNA
cccccgcaagccaccagacgg

SEQ ID NO: 6585 - RNA, 21 nt, synthetic construct
  source 1..21: mol_type = other RNA
cccccgcctccagcgcgcgct

SEQ ID NO: 6586 - RNA, 21 nt, synthetic construct
  source 1..21: mol_type = other RNA
cccccgcgccccgcgcagtgg

SEQ ID NO: 6587 - RNA, 21 nt, synthetic construct
  source 1..21: mol_type = other RNA
cccccgctcctcccccacccc

SEQ ID NO: 6588 - RNA, 21 nt, synthetic construct
  source 1..21: mol_type = other RNA
cccccgttctcgcggccttgt

SEQ ID NO: 6589 - RNA, 21 nt, synthetic construct
  source 1..21: mol_type = other RNA
ccccctagccacccatccccc

SEQ ID NO: 6590 - RNA, 21 nt, synthetic construct
  source 1..21: mol_type = other RNA
ccccctccccgcctttggctc

SEQ ID NO: 6591 - RNA, 21 nt, synthetic construct
  source 1..21: mol_type = other RNA
ccccctcccgccgcgccattg

SEQ ID NO: 6592 - RNA, 21 nt, synthetic construct
  source 1..21: mol_type = other RNA
ccccctcgccgccttgcacac

SEQ ID NO: 6593 - RNA, 21 nt, synthetic construct
  source 1..21: mol_type = other RNA
ccccctctaatctaggcgacc

SEQ ID NO: 6594 - RNA, 21 nt, synthetic construct
  source 1..21: mol_type = other RNA
ccccctgggtggggcgggtag

SEQ ID NO: 6595 - RNA, 21 nt, synthetic construct
  source 1..21: mol_type = other RNA
ccccctttcatgtttttcctg

SEQ ID NO: 6596 - RNA, 21 nt, synthetic construct
  source 1..21: mol_type = other RNA
ccccctttcctgggaactgcc

SEQ ID NO: 6597 - RNA, 21 nt, synthetic construct
  source 1..21: mol_type = other RNA
ccccgaaggaaggggagggtg

SEQ ID NO: 6598 - RNA, 21 nt, synthetic construct
  source 1..21: mol_type = other RNA
ccccgaggccgagcgccgcag

SEQ ID NO: 6599 - RNA, 21 nt, synthetic construct
  source 1..21: mol_type = other RNA
ccccgatcccccactccctac

SEQ ID NO: 6600 - RNA, 21 nt, synthetic construct
  source 1..21: mol_type = other RNA
ccccgcaagccaccagacggc

SEQ ID NO: 6601 - RNA, 21 nt, synthetic construct
  source 1..21: mol_type = other RNA
ccccgcacccattggcccact

SEQ ID NO: 6602 - RNA, 21 nt, synthetic construct
  source 1..21: mol_type = other RNA
ccccgcctccagcgcgcgctt

SEQ ID NO: 6603 - RNA, 21 nt, synthetic construct
  source 1..21: mol_type = other RNA
ccccgcctttggctcgctccg

SEQ ID NO: 6604 - RNA, 21 nt, synthetic construct
  source 1..21: mol_type = other RNA
ccccgcgcagtggtttcgctc

SEQ ID NO: 6605 - RNA, 21 nt, synthetic construct
  source 1..21: mol_type = other RNA
ccccgcgccccgcgcagtggt

SEQ ID NO: 6606 - RNA, 21 nt, synthetic construct
  source 1..21: mol_type = other RNA
ccccgcgcccctgcgcaacgt

SEQ ID NO: 6607 - RNA, 21 nt, synthetic construct
  source 1..21: mol_type = other RNA
ccccgcgctcgctctccttgg

SEQ ID NO: 6608 - RNA, 21 nt, synthetic construct
  source 1..21: mol_type = other RNA
ccccgctcctcccccaccccc

SEQ ID NO: 6609 - RNA, 21 nt, synthetic construct
  source 1..21: mol_type = other RNA
ccccggcagcgcctgggacaa

SEQ ID NO: 6610 - RNA, 21 nt, synthetic construct
  source 1..21: mol_type = other RNA
ccccggcggcttccgctgatt

SEQ ID NO: 6611 - RNA, 21 nt, synthetic construct
  source 1..21: mol_type = other RNA
ccccgggttcccaccgcctga

SEQ ID NO: 6612 - RNA, 21 nt, synthetic construct
  source 1..21: mol_type = other RNA
ccccgtgcggtcagtggcgtt

SEQ ID NO: 6613 - RNA, 21 nt, synthetic construct
  source 1..21: mol_type = other RNA
ccccgtggcgtgtgccacagc

SEQ ID NO: 6614 - RNA, 21 nt, synthetic construct
  source 1..21: mol_type = other RNA
ccccgttctcgcggccttgtg

SEQ ID NO: 6615 - RNA, 21 nt, synthetic construct
  source 1..21: mol_type = other RNA
cccctacctagccgaggctct

SEQ ID NO: 6616 - RNA, 21 nt, synthetic construct
  source 1..21: mol_type = other RNA
cccctagccacccatcccccc

SEQ ID NO: 6617 - RNA, 21 nt, synthetic construct
  source 1..21: mol_type = other RNA
cccctcccaccagagttccgc

SEQ ID NO: 6618 - RNA, 21 nt, synthetic construct
  source 1..21: mol_type = other RNA
cccctcccccaacgcctcttc

SEQ ID NO: 6619 - RNA, 21 nt, synthetic construct
  source 1..21: mol_type = other RNA
cccctccccgcctttggctcg

SEQ ID NO: 6620 - RNA, 21 nt, synthetic construct
  source 1..21: mol_type = other RNA
cccctcccgccgcgccattgg

SEQ ID NO: 6621 - RNA, 21 nt, synthetic construct
  source 1..21: mol_type = other RNA
cccctccgtaatcttcctgga

SEQ ID NO: 6622 - RNA, 21 nt, synthetic construct
  source 1..21: mol_type = other RNA
cccctcgccgccttgcacaca

SEQ ID NO: 6623 - RNA, 21 nt, synthetic construct
  source 1..21: mol_type = other RNA
cccctctaatctaggcgaccc

SEQ ID NO: 6624 - RNA, 21 nt, synthetic construct
  source 1..21: mol_type = other RNA
cccctgcgcaacgtggcagga

SEQ ID NO: 6625 - RNA, 21 nt, synthetic construct
  source 1..21: mol_type = other RNA
cccctggcgccggcgctggga

SEQ ID NO: 6626 - RNA, 21 nt, synthetic construct
  source 1..21: mol_type = other RNA
cccctggggcccgatcgtgag

SEQ ID NO: 6627 - RNA, 21 nt, synthetic construct
  source 1..21: mol_type = other RNA
cccctgggtggggcgggtagg

SEQ ID NO: 6628 - RNA, 21 nt, synthetic construct
  source 1..21: mol_type = other RNA
ccccttccttcgggggagtcg

SEQ ID NO: 6629 - RNA, 21 nt, synthetic construct
  source 1..21: mol_type = other RNA
ccccttctatgctaattgatt

SEQ ID NO: 6630 - RNA, 21 nt, synthetic construct
  source 1..21: mol_type = other RNA
cccctttcatgtttttcctgg

SEQ ID NO: 6631 - RNA, 21 nt, synthetic construct
  source 1..21: mol_type = other RNA
cccctttccctcccaacgtaa

SEQ ID NO: 6632 - RNA, 21 nt, synthetic construct
  source 1..21: mol_type = other RNA
cccctttcctgggaactgcct

SEQ ID NO: 6633 - RNA, 21 nt, synthetic construct
  source 1..21: mol_type = other RNA
cccgaaggaaggggagggtgg

SEQ ID NO: 6634 - RNA, 21 nt, synthetic construct
  source 1..21: mol_type = other RNA
cccgacctgctacaggcactc

SEQ ID NO: 6635 - RNA, 21 nt, synthetic construct
  source 1..21: mol_type = other RNA
cccgacggcgtaactgacagg

SEQ ID NO: 6636 - RNA, 21 nt, synthetic construct
  source 1..21: mol_type = other RNA
cccgacttacacgcagaggga

SEQ ID NO: 6637 - RNA, 21 nt, synthetic construct
  source 1..21: mol_type = other RNA
cccgacttcccacgggaaagg

SEQ ID NO: 6638 - RNA, 21 nt, synthetic construct
  source 1..21: mol_type = other RNA
cccgagcggaaacgccactga

SEQ ID NO: 6639 - RNA, 21 nt, synthetic construct
  source 1..21: mol_type = other RNA
cccgaggccgagcgccgcagt

SEQ ID NO: 6640 - RNA, 21 nt, synthetic construct
  source 1..21: mol_type = other RNA
cccgatcccccactccctacc

SEQ ID NO: 6641 - RNA, 21 nt, synthetic construct
  source 1..21: mol_type = other RNA
cccgatcgtgaggttcggtct

SEQ ID NO: 6642 - RNA, 21 nt, synthetic construct
  source 1..21: mol_type = other RNA
cccgcaagccaccagacggcc

SEQ ID NO: 6643 - RNA, 21 nt, synthetic construct
  source 1..21: mol_type = other RNA
cccgcacacccagcatctcta

SEQ ID NO: 6644 - RNA, 21 nt, synthetic construct
  source 1..21: mol_type = other RNA
cccgcacccattggcccactc

SEQ ID NO: 6645 - RNA, 21 nt, synthetic construct
  source 1..21: mol_type = other RNA
cccgccagtccgccaacacag

SEQ ID NO: 6646 - RNA, 21 nt, synthetic construct
  source 1..21: mol_type = other RNA
cccgccccacccagggggcaa

SEQ ID NO: 6647 - RNA, 21 nt, synthetic construct
  source 1..21: mol_type = other RNA
cccgccgcctgcttgtcttcg

SEQ ID NO: 6648 - RNA, 21 nt, synthetic construct
  source 1..21: mol_type = other RNA
cccgccgcgccattggcctct

SEQ ID NO: 6649 - RNA, 21 nt, synthetic construct
  source 1..21: mol_type = other RNA
cccgccgtgtgtgaaaacaca

SEQ ID NO: 6650 - RNA, 21 nt, synthetic construct
  source 1..21: mol_type = other RNA
cccgcctccagcgcgcgcttc

SEQ ID NO: 6651 - RNA, 21 nt, synthetic construct
  source 1..21: mol_type = other RNA
cccgcctgcatccagccaccc

SEQ ID NO: 6652 - RNA, 21 nt, synthetic construct
  source 1..21: mol_type = other RNA
cccgcctgcgctcagagactc

SEQ ID NO: 6653 - RNA, 21 nt, synthetic construct
  source 1..21: mol_type = other RNA
cccgcctttggctcgctccgc

SEQ ID NO: 6654 - RNA, 21 nt, synthetic construct
  source 1..21: mol_type = other RNA
cccgcgcagtggtttcgctca

SEQ ID NO: 6655 - RNA, 21 nt, synthetic construct
  source 1..21: mol_type = other RNA
cccgcgccagagccgatttca

SEQ ID NO: 6656 - RNA, 21 nt, synthetic construct
  source 1..21: mol_type = other RNA
cccgcgccccgcgcagtggtt

SEQ ID NO: 6657 - RNA, 21 nt, synthetic construct
  source 1..21: mol_type = other RNA
cccgcgcccctgcgcaacgtg

SEQ ID NO: 6658 - RNA, 21 nt, synthetic construct
  source 1..21: mol_type = other RNA
cccgcgctcgctctccttggg

SEQ ID NO: 6659 - RNA, 21 nt, synthetic construct
  source 1..21: mol_type = other RNA
cccgctcctcccccaccccca

SEQ ID NO: 6660 - RNA, 21 nt, synthetic construct
  source 1..21: mol_type = other RNA
cccgctgcccgagcggaaacg

SEQ ID NO: 6661 - RNA, 21 nt, synthetic construct
  source 1..21: mol_type = other RNA
cccggcagcgcctgggacaag

SEQ ID NO: 6662 - RNA, 21 nt, synthetic construct
  source 1..21: mol_type = other RNA
cccggccaggaaacgccgtgg

SEQ ID NO: 6663 - RNA, 21 nt, synthetic construct
  source 1..21: mol_type = other RNA
cccggcggcttccgctgattg

SEQ ID NO: 6664 - RNA, 21 nt, synthetic construct
  source 1..21: mol_type = other RNA
cccgggaggcggcaggactcg

SEQ ID NO: 6665 - RNA, 21 nt, synthetic construct
  source 1..21: mol_type = other RNA
cccgggttcccaccgcctgaa

SEQ ID NO: 6666 - RNA, 21 nt, synthetic construct
  source 1..21: mol_type = other RNA
cccggtcccacagcttcgaca

SEQ ID NO: 6667 - RNA, 21 nt, synthetic construct
  source 1..21: mol_type = other RNA
cccgtacccgtgaggtggggg

SEQ ID NO: 6668 - RNA, 21 nt, synthetic construct
  source 1..21: mol_type = other RNA
cccgtgaggtgggggtggggg

SEQ ID NO: 6669 - RNA, 21 nt, synthetic construct
  source 1..21: mol_type = other RNA
cccgtgcggtcagtggcgttt

SEQ ID NO: 6670 - RNA, 21 nt, synthetic construct
  source 1..21: mol_type = other RNA
cccgtggcgtgtgccacagcg

SEQ ID NO: 6671 - RNA, 21 nt, synthetic construct
  source 1..21: mol_type = other RNA
cccgtgggaagtcgggaacat

SEQ ID NO: 6672 - RNA, 21 nt, synthetic construct
  source 1..21: mol_type = other RNA
cccgttctcgcggccttgtga

SEQ ID NO: 6673 - RNA, 21 nt, synthetic construct
  source 1..21: mol_type = other RNA
ccctacacattcaacgaggct

SEQ ID NO: 6674 - RNA, 21 nt, synthetic construct
  source 1..21: mol_type = other RNA
ccctacccccgttctcgcggc

SEQ ID NO: 6675 - RNA, 21 nt, synthetic construct
  source 1..21: mol_type = other RNA
ccctacctagccgaggctctc

SEQ ID NO: 6676 - RNA, 21 nt, synthetic construct
  source 1..21: mol_type = other RNA
ccctagccacccatcccccca

SEQ ID NO: 6677 - RNA, 21 nt, synthetic construct
  source 1..21: mol_type = other RNA
ccctcccaacgtaacaaacat

SEQ ID NO: 6678 - RNA, 21 nt, synthetic construct
  source 1..21: mol_type = other RNA
ccctcccaccagagttccgct

SEQ ID NO: 6679 - RNA, 21 nt, synthetic construct
  source 1..21: mol_type = other RNA
ccctccccaagctcttaggag

SEQ ID NO: 6680 - RNA, 21 nt, synthetic construct
  source 1..21: mol_type = other RNA
ccctcccccaacgcctcttca

SEQ ID NO: 6681 - RNA, 21 nt, synthetic construct
  source 1..21: mol_type = other RNA
ccctccccgcctttggctcgc

SEQ ID NO: 6682 - RNA, 21 nt, synthetic construct
  source 1..21: mol_type = other RNA
ccctcccctggggcccgatcg

SEQ ID NO: 6683 - RNA, 21 nt, synthetic construct
  source 1..21: mol_type = other RNA
ccctccccttccttcggggga

SEQ ID NO: 6684 - RNA, 21 nt, synthetic construct
  source 1..21: mol_type = other RNA
ccctcccgccgcgccattggc

SEQ ID NO: 6685 - RNA, 21 nt, synthetic construct
  source 1..21: mol_type = other RNA
ccctcccgcctgcatccagcc

SEQ ID NO: 6686 - RNA, 21 nt, synthetic construct
  source 1..21: mol_type = other RNA
ccctccgctcgaaatacacag

SEQ ID NO: 6687 - RNA, 21 nt, synthetic construct
  source 1..21: mol_type = other RNA
ccctccgtaatcttcctggac

SEQ ID NO: 6688 - RNA, 21 nt, synthetic construct
  source 1..21: mol_type = other RNA
ccctcgccgccttgcacacac

SEQ ID NO: 6689 - RNA, 21 nt, synthetic construct
  source 1..21: mol_type = other RNA
ccctctaatctaggcgaccca

SEQ ID NO: 6690 - RNA, 21 nt, synthetic construct
  source 1..21: mol_type = other RNA
ccctctcatgcgatttaccta

SEQ ID NO: 6691 - RNA, 21 nt, synthetic construct
  source 1..21: mol_type = other RNA
ccctctcgttttctggcttcc

SEQ ID NO: 6692 - RNA, 21 nt, synthetic construct
  source 1..21: mol_type = other RNA
ccctctgcgagagcaatggct

SEQ ID NO: 6693 - RNA, 21 nt, synthetic construct
  source 1..21: mol_type = other RNA
ccctctgcgtgtaagtcggga

SEQ ID NO: 6694 - RNA, 21 nt, synthetic construct
  source 1..21: mol_type = other RNA
ccctgcgcaacgtggcaggaa

SEQ ID NO: 6695 - RNA, 21 nt, synthetic construct
  source 1..21: mol_type = other RNA
ccctgcggcaaccggaggggg

SEQ ID NO: 6696 - RNA, 21 nt, synthetic construct
  source 1..21: mol_type = other RNA
ccctggcgccggcgctgggaa

SEQ ID NO: 6697 - RNA, 21 nt, synthetic construct
  source 1..21: mol_type = other RNA
ccctgggaaaatggggtgttg

SEQ ID NO: 6698 - RNA, 21 nt, synthetic construct
  source 1..21: mol_type = other RNA
ccctggggcccgatcgtgagg

SEQ ID NO: 6699 - RNA, 21 nt, synthetic construct
  source 1..21: mol_type = other RNA
ccctgggtggggcgggtaggt

SEQ ID NO: 6700 - RNA, 21 nt, synthetic construct
  source 1..21: mol_type = other RNA
ccctggttcaagtaggtaaat

SEQ ID NO: 6701 - RNA, 21 nt, synthetic construct
  source 1..21: mol_type = other RNA
cccttaccttgtcccaggcgc

SEQ ID NO: 6702 - RNA, 21 nt, synthetic construct
  source 1..21: mol_type = other RNA
cccttcaggcggtgggaaccc

SEQ ID NO: 6703 - RNA, 21 nt, synthetic construct
  source 1..21: mol_type = other RNA
cccttccctcccctggggccc

SEQ ID NO: 6704 - RNA, 21 nt, synthetic construct
  source 1..21: mol_type = other RNA
cccttccttcgggggagtcgg

SEQ ID NO: 6705 - RNA, 21 nt, synthetic construct
  source 1..21: mol_type = other RNA
cccttctatgctaattgattc

SEQ ID NO: 6706 - RNA, 21 nt, synthetic construct
  source 1..21: mol_type = other RNA
cccttctccctccccctccgg

SEQ ID NO: 6707 - RNA, 21 nt, synthetic construct
  source 1..21: mol_type = other RNA
cccttgaggagaggcctcttg

SEQ ID NO: 6708 - RNA, 21 nt, synthetic construct
  source 1..21: mol_type = other RNA
cccttgctactggctcgagtc

SEQ ID NO: 6709 - RNA, 21 nt, synthetic construct
  source 1..21: mol_type = other RNA
ccctttatgaattctctttcc

SEQ ID NO: 6710 - RNA, 21 nt, synthetic construct
  source 1..21: mol_type = other RNA
ccctttcatgtttttcctggg

SEQ ID NO: 6711 - RNA, 21 nt, synthetic construct
  source 1..21: mol_type = other RNA
ccctttccctcccaacgtaac

SEQ ID NO: 6712 - RNA, 21 nt, synthetic construct
  source 1..21: mol_type = other RNA
ccctttcctgggaactgccta

SEQ ID NO: 6713 - RNA, 21 nt, synthetic construct
  source 1..21: mol_type = other RNA
ccgaacctcacgatcgggccc

SEQ ID NO: 6714 - RNA, 21 nt, synthetic construct
  source 1..21: mol_type = other RNA
ccgaagcacagcctcttctct

SEQ ID NO: 6715 - RNA, 21 nt, synthetic construct
  source 1..21: mol_type = other RNA
ccgaaggaaggggagggtggg

SEQ ID NO: 6716 - RNA, 21 nt, synthetic construct
  source 1..21: mol_type = other RNA
ccgacagaaaagagaccgaac

SEQ ID NO: 6717 - RNA, 21 nt, synthetic construct
  source 1..21: mol_type = other RNA
ccgacctgctacaggcactcg

SEQ ID NO: 6718 - RNA, 21 nt, synthetic construct
  source 1..21: mol_type = other RNA
ccgacggcgtaactgacagga

SEQ ID NO: 6719 - RNA, 21 nt, synthetic construct
  source 1..21: mol_type = other RNA
ccgactcccccgaaggaaggg

SEQ ID NO: 6720 - RNA, 21 nt, synthetic construct
  source 1..21: mol_type = other RNA
ccgacttacacgcagagggaa

SEQ ID NO: 6721 - RNA, 21 nt, synthetic construct
  source 1..21: mol_type = other RNA
ccgacttcccacgggaaaggc

SEQ ID NO: 6722 - RNA, 21 nt, synthetic construct
  source 1..21: mol_type = other RNA
ccgagacttctggatggcggc

SEQ ID NO: 6723 - RNA, 21 nt, synthetic construct
  source 1..21: mol_type = other RNA
ccgagcggaaacgccactgac

SEQ ID NO: 6724 - RNA, 21 nt, synthetic construct
  source 1..21: mol_type = other RNA
ccgaggccgagcgccgcagtg

SEQ ID NO: 6725 - RNA, 21 nt, synthetic construct
  source 1..21: mol_type = other RNA
ccgaggctctctgaggagccg

SEQ ID NO: 6726 - RNA, 21 nt, synthetic construct
  source 1..21: mol_type = other RNA
ccgatcccccactccctaccc

SEQ ID NO: 6727 - RNA, 21 nt, synthetic construct
  source 1..21: mol_type = other RNA
ccgatcgtgaggttcggtctc

SEQ ID NO: 6728 - RNA, 21 nt, synthetic construct
  source 1..21: mol_type = other RNA
ccgattggccgtttctcctcc

SEQ ID NO: 6729 - RNA, 21 nt, synthetic construct
  source 1..21: mol_type = other RNA
ccgatttcactgaccctcccc

SEQ ID NO: 6730 - RNA, 21 nt, synthetic construct
  source 1..21: mol_type = other RNA
ccgcaagccaccagacggccc

SEQ ID NO: 6731 - RNA, 21 nt, synthetic construct
  source 1..21: mol_type = other RNA
ccgcacacccagcatctctac

SEQ ID NO: 6732 - RNA, 21 nt, synthetic construct
  source 1..21: mol_type = other RNA
ccgcacccattggcccactcg

SEQ ID NO: 6733 - RNA, 21 nt, synthetic construct
  source 1..21: mol_type = other RNA
ccgcacctcccctcccaccag

SEQ ID NO: 6734 - RNA, 21 nt, synthetic construct
  source 1..21: mol_type = other RNA
ccgcacggggattcccagcgc

SEQ ID NO: 6735 - RNA, 21 nt, synthetic construct
  source 1..21: mol_type = other RNA
ccgccaacacagtagtgccgg

SEQ ID NO: 6736 - RNA, 21 nt, synthetic construct
  source 1..21: mol_type = other RNA
ccgccaatcagcggaagccgc

SEQ ID NO: 6737 - RNA, 21 nt, synthetic construct
  source 1..21: mol_type = other RNA
ccgccagtccgccaacacagt

SEQ ID NO: 6738 - RNA, 21 nt, synthetic construct
  source 1..21: mol_type = other RNA
ccgccatccagaagtctcggc

SEQ ID NO: 6739 - RNA, 21 nt, synthetic construct
  source 1..21: mol_type = other RNA
ccgcccaccgccccgcaccca

SEQ ID NO: 6740 - RNA, 21 nt, synthetic construct
  source 1..21: mol_type = other RNA
ccgccccacccagggggcaac

SEQ ID NO: 6741 - RNA, 21 nt, synthetic construct
  source 1..21: mol_type = other RNA
ccgccccgcacccattggccc

SEQ ID NO: 6742 - RNA, 21 nt, synthetic construct
  source 1..21: mol_type = other RNA
ccgccccgggttcccaccgcc

SEQ ID NO: 6743 - RNA, 21 nt, synthetic construct
  source 1..21: mol_type = other RNA
ccgcccgcctgcgctcagaga

SEQ ID NO: 6744 - RNA, 21 nt, synthetic construct
  source 1..21: mol_type = other RNA
ccgccctgcggcaaccggagg

SEQ ID NO: 6745 - RNA, 21 nt, synthetic construct
  source 1..21: mol_type = other RNA
ccgccgccatccagaagtctc

SEQ ID NO: 6746 - RNA, 21 nt, synthetic construct
  source 1..21: mol_type = other RNA
ccgccgcccgcctgcgctcag

SEQ ID NO: 6747 - RNA, 21 nt, synthetic construct
  source 1..21: mol_type = other RNA
ccgccgcctgcttgtcttcga

SEQ ID NO: 6748 - RNA, 21 nt, synthetic construct
  source 1..21: mol_type = other RNA
ccgccgcgccattggcctctc

SEQ ID NO: 6749 - RNA, 21 nt, synthetic construct
  source 1..21: mol_type = other RNA
ccgccggggccgcctagagaa

SEQ ID NO: 6750 - RNA, 21 nt, synthetic construct
  source 1..21: mol_type = other RNA
ccgccgtgtgtgaaaacacaa

SEQ ID NO: 6751 - RNA, 21 nt, synthetic construct
  source 1..21: mol_type = other RNA
ccgcctagagaagaggctgtg

SEQ ID NO: 6752 - RNA, 21 nt, synthetic construct
  source 1..21: mol_type = other RNA
ccgcctccagcgcgcgcttcc

SEQ ID NO: 6753 - RNA, 21 nt, synthetic construct
  source 1..21: mol_type = other RNA
ccgcctgaagggcgagacaag

SEQ ID NO: 6754 - RNA, 21 nt, synthetic construct
  source 1..21: mol_type = other RNA
ccgcctgcatccagccacccc

SEQ ID NO: 6755 - RNA, 21 nt, synthetic construct
  source 1..21: mol_type = other RNA
ccgcctgcgctcagagactca

SEQ ID NO: 6756 - RNA, 21 nt, synthetic construct
  source 1..21: mol_type = other RNA
ccgcctgcttgtcttcgacac

SEQ ID NO: 6757 - RNA, 21 nt, synthetic construct
  source 1..21: mol_type = other RNA
ccgccttgcacacaccgttgc

SEQ ID NO: 6758 - RNA, 21 nt, synthetic construct
  source 1..21: mol_type = other RNA
ccgcctttctgccccccaccc

SEQ ID NO: 6759 - RNA, 21 nt, synthetic construct
  source 1..21: mol_type = other RNA
ccgcctttggctcgctccgcc

SEQ ID NO: 6760 - RNA, 21 nt, synthetic construct
  source 1..21: mol_type = other RNA
ccgcgagaacgggggtaggga

SEQ ID NO: 6761 - RNA, 21 nt, synthetic construct
  source 1..21: mol_type = other RNA
ccgcgatctcccctccgtaat

SEQ ID NO: 6762 - RNA, 21 nt, synthetic construct
  source 1..21: mol_type = other RNA
ccgcgcagtggtttcgctcat

SEQ ID NO: 6763 - RNA, 21 nt, synthetic construct
  source 1..21: mol_type = other RNA
ccgcgccagagccgatttcac

SEQ ID NO: 6764 - RNA, 21 nt, synthetic construct
  source 1..21: mol_type = other RNA
ccgcgccattggcctctccgc

SEQ ID NO: 6765 - RNA, 21 nt, synthetic construct
  source 1..21: mol_type = other RNA
ccgcgccccgcgcagtggttt

SEQ ID NO: 6766 - RNA, 21 nt, synthetic construct
  source 1..21: mol_type = other RNA
ccgcgcccctgcgcaacgtgg

SEQ ID NO: 6767 - RNA, 21 nt, synthetic construct
  source 1..21: mol_type = other RNA
ccgcgcccgcacacccagcat

SEQ ID NO: 6768 - RNA, 21 nt, synthetic construct
  source 1..21: mol_type = other RNA
ccgcgctcgctctccttgggt

SEQ ID NO: 6769 - RNA, 21 nt, synthetic construct
  source 1..21: mol_type = other RNA
ccgcggccgccgccatccaga

SEQ ID NO: 6770 - RNA, 21 nt, synthetic construct
  source 1..21: mol_type = other RNA
ccgcgttgggcctaactcgag

SEQ ID NO: 6771 - RNA, 21 nt, synthetic construct
  source 1..21: mol_type = other RNA
ccgctcccctacctagccgag

SEQ ID NO: 6772 - RNA, 21 nt, synthetic construct
  source 1..21: mol_type = other RNA
ccgctcccttctccctccccc

SEQ ID NO: 6773 - RNA, 21 nt, synthetic construct
  source 1..21: mol_type = other RNA
ccgctcctcccccacccccac

SEQ ID NO: 6774 - RNA, 21 nt, synthetic construct
  source 1..21: mol_type = other RNA
ccgctcgaaatacacaggcat

SEQ ID NO: 6775 - RNA, 21 nt, synthetic construct
  source 1..21: mol_type = other RNA
ccgctcgggcagcgggctgag

SEQ ID NO: 6776 - RNA, 21 nt, synthetic construct
  source 1..21: mol_type = other RNA
ccgctgattggcggcgagtgg

SEQ ID NO: 6777 - RNA, 21 nt, synthetic construct
  source 1..21: mol_type = other RNA
ccgctgcccgagcggaaacgc

SEQ ID NO: 6778 - RNA, 21 nt, synthetic construct
  source 1..21: mol_type = other RNA
ccgcttagcgactctcgcgtt

SEQ ID NO: 6779 - RNA, 21 nt, synthetic construct
  source 1..21: mol_type = other RNA
ccggaagcgctcctccctctg

SEQ ID NO: 6780 - RNA, 21 nt, synthetic construct
  source 1..21: mol_type = other RNA
ccggacggagccattgctctc

SEQ ID NO: 6781 - RNA, 21 nt, synthetic construct
  source 1..21: mol_type = other RNA
ccggagcgccgaagcacagcc

SEQ ID NO: 6782 - RNA, 21 nt, synthetic construct
  source 1..21: mol_type = other RNA
ccggagggggagggagaaggg

SEQ ID NO: 6783 - RNA, 21 nt, synthetic construct
  source 1..21: mol_type = other RNA
ccggcactactgtgttggcgg

SEQ ID NO: 6784 - RNA, 21 nt, synthetic construct
  source 1..21: mol_type = other RNA
ccggcagcgcctgggacaagg

SEQ ID NO: 6785 - RNA, 21 nt, synthetic construct
  source 1..21: mol_type = other RNA
ccggccaggaaacgccgtggc

SEQ ID NO: 6786 - RNA, 21 nt, synthetic construct
  source 1..21: mol_type = other RNA
ccggcccccctctttccctgg

SEQ ID NO: 6787 - RNA, 21 nt, synthetic construct
  source 1..21: mol_type = other RNA
ccggccgagacttctggatgg

SEQ ID NO: 6788 - RNA, 21 nt, synthetic construct
  source 1..21: mol_type = other RNA
ccggccgcgcccgcacaccca

SEQ ID NO: 6789 - RNA, 21 nt, synthetic construct
  source 1..21: mol_type = other RNA
ccggcgctgggaatccccgtg

SEQ ID NO: 6790 - RNA, 21 nt, synthetic construct
  source 1..21: mol_type = other RNA
ccggcggcttccgctgattgg

SEQ ID NO: 6791 - RNA, 21 nt, synthetic construct
  source 1..21: mol_type = other RNA
ccggctagcctcttgtcgccg

SEQ ID NO: 6792 - RNA, 21 nt, synthetic construct
  source 1..21: mol_type = other RNA
ccggctcctcagagagcctcg

SEQ ID NO: 6793 - RNA, 21 nt, synthetic construct
  source 1..21: mol_type = other RNA
ccgggaatggcccgtacccgt

SEQ ID NO: 6794 - RNA, 21 nt, synthetic construct
  source 1..21: mol_type = other RNA
ccgggaggcggcaggactcga

SEQ ID NO: 6795 - RNA, 21 nt, synthetic construct
  source 1..21: mol_type = other RNA
ccgggcccttgctactggctc

SEQ ID NO: 6796 - RNA, 21 nt, synthetic construct
  source 1..21: mol_type = other RNA
ccggggccgcctagagaagag

SEQ ID NO: 6797 - RNA, 21 nt, synthetic construct
  source 1..21: mol_type = other RNA
ccgggttcccaccgcctgaag

SEQ ID NO: 6798 - RNA, 21 nt, synthetic construct
  source 1..21: mol_type = other RNA
ccggtcccacagcttcgacag

SEQ ID NO: 6799 - RNA, 21 nt, synthetic construct
  source 1..21: mol_type = other RNA
ccggtttcgagcattttccgc

SEQ ID NO: 6800 - RNA, 21 nt, synthetic construct
  source 1..21: mol_type = other RNA
ccgtaatcttcctggacgcct

SEQ ID NO: 6801 - RNA, 21 nt, synthetic construct
  source 1..21: mol_type = other RNA
ccgtaccaacgcccgcctccc

SEQ ID NO: 6802 - RNA, 21 nt, synthetic construct
  source 1..21: mol_type = other RNA
ccgtacccgtgaggtgggggt

SEQ ID NO: 6803 - RNA, 21 nt, synthetic construct
  source 1..21: mol_type = other RNA
ccgtccggtttcgagcatttt

SEQ ID NO: 6804 - RNA, 21 nt, synthetic construct
  source 1..21: mol_type = other RNA
ccgtcgggagtacgcagccgc

SEQ ID NO: 6805 - RNA, 21 nt, synthetic construct
  source 1..21: mol_type = other RNA
ccgtctccccgcgctcgctct

SEQ ID NO: 6806 - RNA, 21 nt, synthetic construct
  source 1..21: mol_type = other RNA
ccgtctggtggcttgcggggg

SEQ ID NO: 6807 - RNA, 21 nt, synthetic construct
  source 1..21: mol_type = other RNA
ccgtgaggtgggggtgggggg

SEQ ID NO: 6808 - RNA, 21 nt, synthetic construct
  source 1..21: mol_type = other RNA
ccgtgcggtcagtggcgtttc

SEQ ID NO: 6809 - RNA, 21 nt, synthetic construct
  source 1..21: mol_type = other RNA
ccgtggcgccgcgttgggcct

SEQ ID NO: 6810 - RNA, 21 nt, synthetic construct
  source 1..21: mol_type = other RNA
ccgtggcgtgtgccacagcgt

SEQ ID NO: 6811 - RNA, 21 nt, synthetic construct
  source 1..21: mol_type = other RNA
ccgtgggaagtcgggaacata

SEQ ID NO: 6812 - RNA, 21 nt, synthetic construct
  source 1..21: mol_type = other RNA
ccgtgtgtgaaaacacaaatg

SEQ ID NO: 6813 - RNA, 21 nt, synthetic construct
  source 1..21: mol_type = other RNA
ccgttctcgcggccttgtgac

SEQ ID NO: 6814 - RNA, 21 nt, synthetic construct
  source 1..21: mol_type = other RNA
ccgttgcaacaccccattttc

SEQ ID NO: 6815 - RNA, 21 nt, synthetic construct
  source 1..21: mol_type = other RNA
ccgtttctcctcccgccgtgt

SEQ ID NO: 6816 - RNA, 21 nt, synthetic construct
  source 1..21: mol_type = other RNA
cctaactcgagtcctgccgcc

SEQ ID NO: 6817 - RNA, 21 nt, synthetic construct
  source 1..21: mol_type = other RNA
cctaagagcttggggagggcc

SEQ ID NO: 6818 - RNA, 21 nt, synthetic construct
  source 1..21: mol_type = other RNA
cctacacattcaacgaggcta

SEQ ID NO: 6819 - RNA, 21 nt, synthetic construct
  source 1..21: mol_type = other RNA
cctacactcctcttcacattc

SEQ ID NO: 6820 - RNA, 21 nt, synthetic construct
  source 1..21: mol_type = other RNA
cctacccccgttctcgcggcc

SEQ ID NO: 6821 - RNA, 21 nt, synthetic construct
  source 1..21: mol_type = other RNA
cctacccgccccacccagggg

SEQ ID NO: 6822 - RNA, 21 nt, synthetic construct
  source 1..21: mol_type = other RNA
cctacctacccgccccaccca

SEQ ID NO: 6823 - RNA, 21 nt, synthetic construct
  source 1..21: mol_type = other RNA
cctacctagccgaggctctct

SEQ ID NO: 6824 - RNA, 21 nt, synthetic construct
  source 1..21: mol_type = other RNA
cctactccacgtttacctttc

SEQ ID NO: 6825 - RNA, 21 nt, synthetic construct
  source 1..21: mol_type = other RNA
cctacttgaaccagggctctt

SEQ ID NO: 6826 - RNA, 21 nt, synthetic construct
  source 1..21: mol_type = other RNA
cctagagaagaggctgtgctt

SEQ ID NO: 6827 - RNA, 21 nt, synthetic construct
  source 1..21: mol_type = other RNA
cctagattagagggggatctc

SEQ ID NO: 6828 - RNA, 21 nt, synthetic construct
  source 1..21: mol_type = other RNA
cctagccacccatccccccag

SEQ ID NO: 6829 - RNA, 21 nt, synthetic construct
  source 1..21: mol_type = other RNA
cctagccgaggctctctgagg

SEQ ID NO: 6830 - RNA, 21 nt, synthetic construct
  source 1..21: mol_type = other RNA
cctcaagggaaaggtaaacgt

SEQ ID NO: 6831 - RNA, 21 nt, synthetic construct
  source 1..21: mol_type = other RNA
cctcacgatcgggccccaggg

SEQ ID NO: 6832 - RNA, 21 nt, synthetic construct
  source 1..21: mol_type = other RNA
cctcacgggtacgggccattc

SEQ ID NO: 6833 - RNA, 21 nt, synthetic construct
  source 1..21: mol_type = other RNA
cctcagagagcctcggctagg

SEQ ID NO: 6834 - RNA, 21 nt, synthetic construct
  source 1..21: mol_type = other RNA
cctcagatggctgcttcccaa

SEQ ID NO: 6835 - RNA, 21 nt, synthetic construct
  source 1..21: mol_type = other RNA
cctccagcgcgcgcttcctgc

SEQ ID NO: 6836 - RNA, 21 nt, synthetic construct
  source 1..21: mol_type = other RNA
cctcccaacgtaacaaacatt

SEQ ID NO: 6837 - RNA, 21 nt, synthetic construct
  source 1..21: mol_type = other RNA
cctcccaccagagttccgctc

SEQ ID NO: 6838 - RNA, 21 nt, synthetic construct
  source 1..21: mol_type = other RNA
cctcccaccctccccttcctt

SEQ ID NO: 6839 - RNA, 21 nt, synthetic construct
  source 1..21: mol_type = other RNA
cctccccaagctcttaggagg

SEQ ID NO: 6840 - RNA, 21 nt, synthetic construct
  source 1..21: mol_type = other RNA
cctcccccaacgcctcttcac

SEQ ID NO: 6841 - RNA, 21 nt, synthetic construct
  source 1..21: mol_type = other RNA
cctcccccacccccacgagtg

SEQ ID NO: 6842 - RNA, 21 nt, synthetic construct
  source 1..21: mol_type = other RNA
cctccccgaggccgagcgccg

SEQ ID NO: 6843 - RNA, 21 nt, synthetic construct
  source 1..21: mol_type = other RNA
cctccccgcctttggctcgct

SEQ ID NO: 6844 - RNA, 21 nt, synthetic construct
  source 1..21: mol_type = other RNA
cctcccctcccaccagagttc

SEQ ID NO: 6845 - RNA, 21 nt, synthetic construct
  source 1..21: mol_type = other RNA
cctcccctggggcccgatcgt

SEQ ID NO: 6846 - RNA, 21 nt, synthetic construct
  source 1..21: mol_type = other RNA
cctccccttccttcgggggag

SEQ ID NO: 6847 - RNA, 21 nt, synthetic construct
  source 1..21: mol_type = other RNA
cctcccgccgcgccattggcc

SEQ ID NO: 6848 - RNA, 21 nt, synthetic construct
  source 1..21: mol_type = other RNA
cctcccgccgtgtgtgaaaac

SEQ ID NO: 6849 - RNA, 21 nt, synthetic construct
  source 1..21: mol_type = other RNA
cctcccgcctgcatccagcca

SEQ ID NO: 6850 - RNA, 21 nt, synthetic construct
  source 1..21: mol_type = other RNA
cctccctcccgcctgcatcca

SEQ ID NO: 6851 - RNA, 21 nt, synthetic construct
  source 1..21: mol_type = other RNA
cctccctctgcgagagcaatg

SEQ ID NO: 6852 - RNA, 21 nt, synthetic construct
  source 1..21: mol_type = other RNA
cctccgctcgaaatacacagg

SEQ ID NO: 6853 - RNA, 21 nt, synthetic construct
  source 1..21: mol_type = other RNA
cctccggttgccgcagggcgg

SEQ ID NO: 6854 - RNA, 21 nt, synthetic construct
  source 1..21: mol_type = other RNA
cctccgtaatcttcctggacg

SEQ ID NO: 6855 - RNA, 21 nt, synthetic construct
  source 1..21: mol_type = other RNA
cctccgtctccccgcgctcgc

SEQ ID NO: 6856 - RNA, 21 nt, synthetic construct
  source 1..21: mol_type = other RNA
cctcctaagagcttggggagg

SEQ ID NO: 6857 - RNA, 21 nt, synthetic construct
  source 1..21: mol_type = other RNA
cctcctccgtctccccgcgct

SEQ ID NO: 6858 - RNA, 21 nt, synthetic construct
  source 1..21: mol_type = other RNA
cctcctgcggcgggaggggag

SEQ ID NO: 6859 - RNA, 21 nt, synthetic construct
  source 1..21: mol_type = other RNA
cctcgccgccttgcacacacc

SEQ ID NO: 6860 - RNA, 21 nt, synthetic construct
  source 1..21: mol_type = other RNA
cctcggctaggtaggggagcg

SEQ ID NO: 6861 - RNA, 21 nt, synthetic construct
  source 1..21: mol_type = other RNA
cctcggggaggaccgtaccaa

SEQ ID NO: 6862 - RNA, 21 nt, synthetic construct
  source 1..21: mol_type = other RNA
cctcgttgaatgtgtagggtt

SEQ ID NO: 6863 - RNA, 21 nt, synthetic construct
  source 1..21: mol_type = other RNA
cctctaatctaggcgacccaa

SEQ ID NO: 6864 - RNA, 21 nt, synthetic construct
  source 1..21: mol_type = other RNA
cctctcatgcgatttacctac

SEQ ID NO: 6865 - RNA, 21 nt, synthetic construct
  source 1..21: mol_type = other RNA
cctctccgcccaccgccccgc

SEQ ID NO: 6866 - RNA, 21 nt, synthetic construct
  source 1..21: mol_type = other RNA
cctctcctcaagggaaaggta

SEQ ID NO: 6867 - RNA, 21 nt, synthetic construct
  source 1..21: mol_type = other RNA
cctctcgttttctggcttccc

SEQ ID NO: 6868 - RNA, 21 nt, synthetic construct
  source 1..21: mol_type = other RNA
cctctgcgagagcaatggctc

SEQ ID NO: 6869 - RNA, 21 nt, synthetic construct
  source 1..21: mol_type = other RNA
cctctgcgtgtaagtcgggaa

SEQ ID NO: 6870 - RNA, 21 nt, synthetic construct
  source 1..21: mol_type = other RNA
cctcttcacattcccgactta

SEQ ID NO: 6871 - RNA, 21 nt, synthetic construct
  source 1..21: mol_type = other RNA
cctcttcaccccctttcctgg

SEQ ID NO: 6872 - RNA, 21 nt, synthetic construct
  source 1..21: mol_type = other RNA
cctcttctctaggcggccccg

SEQ ID NO: 6873 - RNA, 21 nt, synthetic construct
  source 1..21: mol_type = other RNA
cctcttgctgccctccgctcg

SEQ ID NO: 6874 - RNA, 21 nt, synthetic construct
  source 1..21: mol_type = other RNA
cctcttgtcgccgattggccg

SEQ ID NO: 6875 - RNA, 21 nt, synthetic construct
  source 1..21: mol_type = other RNA
cctgaagggcgagacaagccc

SEQ ID NO: 6876 - RNA, 21 nt, synthetic construct
  source 1..21: mol_type = other RNA
cctgacccaggaaaaacatga

SEQ ID NO: 6877 - RNA, 21 nt, synthetic construct
  source 1..21: mol_type = other RNA
cctgattggctgtcgaagctg

SEQ ID NO: 6878 - RNA, 21 nt, synthetic construct
  source 1..21: mol_type = other RNA
cctgcatccagccaccccttt

SEQ ID NO: 6879 - RNA, 21 nt, synthetic construct
  source 1..21: mol_type = other RNA
cctgcgcaacgtggcaggaag

SEQ ID NO: 6880 - RNA, 21 nt, synthetic construct
  source 1..21: mol_type = other RNA
cctgcgctcagagactcacgc

SEQ ID NO: 6881 - RNA, 21 nt, synthetic construct
  source 1..21: mol_type = other RNA
cctgcggcaaccggaggggga

SEQ ID NO: 6882 - RNA, 21 nt, synthetic construct
  source 1..21: mol_type = other RNA
cctgcggcgggaggggagggt

SEQ ID NO: 6883 - RNA, 21 nt, synthetic construct
  source 1..21: mol_type = other RNA
cctgctacaggcactcgtggg

SEQ ID NO: 6884 - RNA, 21 nt, synthetic construct
  source 1..21: mol_type = other RNA
cctgcttgtcttcgacacctg

SEQ ID NO: 6885 - RNA, 21 nt, synthetic construct
  source 1..21: mol_type = other RNA
cctggacgccttccctctcgt

SEQ ID NO: 6886 - RNA, 21 nt, synthetic construct
  source 1..21: mol_type = other RNA
cctggagttgagccagattgt

SEQ ID NO: 6887 - RNA, 21 nt, synthetic construct
  source 1..21: mol_type = other RNA
cctggccctccccaagctctt

SEQ ID NO: 6888 - RNA, 21 nt, synthetic construct
  source 1..21: mol_type = other RNA
cctggccgggaatggcccgta

SEQ ID NO: 6889 - RNA, 21 nt, synthetic construct
  source 1..21: mol_type = other RNA
cctggcgccggcgctgggaat

SEQ ID NO: 6890 - RNA, 21 nt, synthetic construct
  source 1..21: mol_type = other RNA
cctgggaaaatggggtgttgc

SEQ ID NO: 6891 - RNA, 21 nt, synthetic construct
  source 1..21: mol_type = other RNA
cctgggaactgcctactccac

SEQ ID NO: 6892 - RNA, 21 nt, synthetic construct
  source 1..21: mol_type = other RNA
cctgggacaaggtaagggtcc

SEQ ID NO: 6893 - RNA, 21 nt, synthetic construct
  source 1..21: mol_type = other RNA
cctggggcccgatcgtgaggt

SEQ ID NO: 6894 - RNA, 21 nt, synthetic construct
  source 1..21: mol_type = other RNA
cctgggtcaggacgcttcccc

SEQ ID NO: 6895 - RNA, 21 nt, synthetic construct
  source 1..21: mol_type = other RNA
cctgggtggggcgggtaggta

SEQ ID NO: 6896 - RNA, 21 nt, synthetic construct
  source 1..21: mol_type = other RNA
cctggttcaagtaggtaaatc

SEQ ID NO: 6897 - RNA, 21 nt, synthetic construct
  source 1..21: mol_type = other RNA
cctgtagcaggtcgggcttgt

SEQ ID NO: 6898 - RNA, 21 nt, synthetic construct
  source 1..21: mol_type = other RNA
cctgtcagttacgccgtcggg

SEQ ID NO: 6899 - RNA, 21 nt, synthetic construct
  source 1..21: mol_type = other RNA
cctgtgtatttcgagcggagg

SEQ ID NO: 6900 - RNA, 21 nt, synthetic construct
  source 1..21: mol_type = other RNA
ccttaccttgtcccaggcgct

SEQ ID NO: 6901 - RNA, 21 nt, synthetic construct
  source 1..21: mol_type = other RNA
ccttcaggcggtgggaacccg

SEQ ID NO: 6902 - RNA, 21 nt, synthetic construct
  source 1..21: mol_type = other RNA
ccttccctcccctggggcccg

SEQ ID NO: 6903 - RNA, 21 nt, synthetic construct
  source 1..21: mol_type = other RNA
ccttccctctcgttttctggc

SEQ ID NO: 6904 - RNA, 21 nt, synthetic construct
  source 1..21: mol_type = other RNA
ccttccttcgggggagtcggt

SEQ ID NO: 6905 - RNA, 21 nt, synthetic construct
  source 1..21: mol_type = other RNA
ccttcgccacccccaccacac

SEQ ID NO: 6906 - RNA, 21 nt, synthetic construct
  source 1..21: mol_type = other RNA
ccttcgggggagtcggtttac

SEQ ID NO: 6907 - RNA, 21 nt, synthetic construct
  source 1..21: mol_type = other RNA
ccttctatgctaattgattct

SEQ ID NO: 6908 - RNA, 21 nt, synthetic construct
  source 1..21: mol_type = other RNA
ccttctccctccccctccggt

SEQ ID NO: 6909 - RNA, 21 nt, synthetic construct
  source 1..21: mol_type = other RNA
ccttgaggagaggcctcttgc

SEQ ID NO: 6910 - RNA, 21 nt, synthetic construct
  source 1..21: mol_type = other RNA
ccttgcacacaccgttgcaac

SEQ ID NO: 6911 - RNA, 21 nt, synthetic construct
  source 1..21: mol_type = other RNA
ccttgctactggctcgagtct

SEQ ID NO: 6912 - RNA, 21 nt, synthetic construct
  source 1..21: mol_type = other RNA
ccttgcttgtctcacttcttg

SEQ ID NO: 6913 - RNA, 21 nt, synthetic construct
  source 1..21: mol_type = other RNA
ccttgggcgtggagaacgatc

SEQ ID NO: 6914 - RNA, 21 nt, synthetic construct
  source 1..21: mol_type = other RNA
ccttgggtcgtgggcctggcc

SEQ ID NO: 6915 - RNA, 21 nt, synthetic construct
  source 1..21: mol_type = other RNA
ccttgtcccaggcgctgccgg

SEQ ID NO: 6916 - RNA, 21 nt, synthetic construct
  source 1..21: mol_type = other RNA
ccttgtgacagacaactctga

SEQ ID NO: 6917 - RNA, 21 nt, synthetic construct
  source 1..21: mol_type = other RNA
cctttatgaattctctttccc

SEQ ID NO: 6918 - RNA, 21 nt, synthetic construct
  source 1..21: mol_type = other RNA
cctttcatgtttttcctgggt

SEQ ID NO: 6919 - RNA, 21 nt, synthetic construct
  source 1..21: mol_type = other RNA
cctttcccgtgggaagtcggg

SEQ ID NO: 6920 - RNA, 21 nt, synthetic construct
  source 1..21: mol_type = other RNA
cctttccctcccaacgtaaca

SEQ ID NO: 6921 - RNA, 21 nt, synthetic construct
  source 1..21: mol_type = other RNA
cctttcccttgaggagaggcc

SEQ ID NO: 6922 - RNA, 21 nt, synthetic construct
  source 1..21: mol_type = other RNA
cctttcctgggaactgcctac

SEQ ID NO: 6923 - RNA, 21 nt, synthetic construct
  source 1..21: mol_type = other RNA
cctttctgccccccaccccca

SEQ ID NO: 6924 - RNA, 21 nt, synthetic construct
  source 1..21: mol_type = other RNA
cctttgaagatattctcacaa

SEQ ID NO: 6925 - RNA, 21 nt, synthetic construct
  source 1..21: mol_type = other RNA
cctttggctcgctccgccttt

SEQ ID NO: 6926 - RNA, 21 nt, synthetic construct
  source 1..21: mol_type = other RNA
cctttgggaagcagccatctg

SEQ ID NO: 6927 - RNA, 21 nt, synthetic construct
  source 1..21: mol_type = other RNA
cgaaaccactgcgcggggcgc

SEQ ID NO: 6928 - RNA, 21 nt, synthetic construct
  source 1..21: mol_type = other RNA
cgaaaccggacggagccattg

SEQ ID NO: 6929 - RNA, 21 nt, synthetic construct
  source 1..21: mol_type = other RNA
cgaaccctacacattcaacga

SEQ ID NO: 6930 - RNA, 21 nt, synthetic construct
  source 1..21: mol_type = other RNA
cgaacctcacgatcgggcccc

SEQ ID NO: 6931 - RNA, 21 nt, synthetic construct
  source 1..21: mol_type = other RNA
cgaagacaagcaggcggcggg

SEQ ID NO: 6932 - RNA, 21 nt, synthetic construct
  source 1..21: mol_type = other RNA
cgaagcacagcctcttctcta

SEQ ID NO: 6933 - RNA, 21 nt, synthetic construct
  source 1..21: mol_type = other RNA
cgaagctgtgggaccgggccc

SEQ ID NO: 6934 - RNA, 21 nt, synthetic construct
  source 1..21: mol_type = other RNA
cgaaggaaggggagggtggga

SEQ ID NO: 6935 - RNA, 21 nt, synthetic construct
  source 1..21: mol_type = other RNA
cgaaggtaatgcctttgggaa

SEQ ID NO: 6936 - RNA, 21 nt, synthetic construct
  source 1..21: mol_type = other RNA
cgacaagaggctagccggaag

SEQ ID NO: 6937 - RNA, 21 nt, synthetic construct
  source 1..21: mol_type = other RNA
cgacacaatctggctcaactc

SEQ ID NO: 6938 - RNA, 21 nt, synthetic construct
  source 1..21: mol_type = other RNA
cgacacctgattggctgtcga

SEQ ID NO: 6939 - RNA, 21 nt, synthetic construct
  source 1..21: mol_type = other RNA
cgacagaaaagagaccgaacc

SEQ ID NO: 6940 - RNA, 21 nt, synthetic construct
  source 1..21: mol_type = other RNA
cgacagccaatcaggtgtcga

SEQ ID NO: 6941 - RNA, 21 nt, synthetic construct
  source 1..21: mol_type = other RNA
cgacccaactccccctttcat

SEQ ID NO: 6942 - RNA, 21 nt, synthetic construct
  source 1..21: mol_type = other RNA
cgacccaaggagagcgagcgc

SEQ ID NO: 6943 - RNA, 21 nt, synthetic construct
  source 1..21: mol_type = other RNA
cgacccccgctcctcccccac

SEQ ID NO: 6944 - RNA, 21 nt, synthetic construct
  source 1..21: mol_type = other RNA
cgacctgctacaggcactcgt

SEQ ID NO: 6945 - RNA, 21 nt, synthetic construct
  source 1..21: mol_type = other RNA
cgacggcgtaactgacaggag

SEQ ID NO: 6946 - RNA, 21 nt, synthetic construct
  source 1..21: mol_type = other RNA
cgactcccccgaaggaagggg

SEQ ID NO: 6947 - RNA, 21 nt, synthetic construct
  source 1..21: mol_type = other RNA
cgactctcgcgttgccccctg

SEQ ID NO: 6948 - RNA, 21 nt, synthetic construct
  source 1..21: mol_type = other RNA
cgacttacacgcagagggaaa

SEQ ID NO: 6949 - RNA, 21 nt, synthetic construct
  source 1..21: mol_type = other RNA
cgacttcccacgggaaaggca

SEQ ID NO: 6950 - RNA, 21 nt, synthetic construct
  source 1..21: mol_type = other RNA
cgagaacgggggtagggagtg

SEQ ID NO: 6951 - RNA, 21 nt, synthetic construct
  source 1..21: mol_type = other RNA
cgagacaagcccgacctgcta

SEQ ID NO: 6952 - RNA, 21 nt, synthetic construct
  source 1..21: mol_type = other RNA
cgagacttctggatggcggcg

SEQ ID NO: 6953 - RNA, 21 nt, synthetic construct
  source 1..21: mol_type = other RNA
cgagagcaatggctccgtccg

SEQ ID NO: 6954 - RNA, 21 nt, synthetic construct
  source 1..21: mol_type = other RNA
cgagagggaaggcgtccagga

SEQ ID NO: 6955 - RNA, 21 nt, synthetic construct
  source 1..21: mol_type = other RNA
cgagagtcgctaagcggctgc

SEQ ID NO: 6956 - RNA, 21 nt, synthetic construct
  source 1..21: mol_type = other RNA
cgagcattttccgctcccttc

SEQ ID NO: 6957 - RNA, 21 nt, synthetic construct
  source 1..21: mol_type = other RNA
cgagccagtagcaagggcccg

SEQ ID NO: 6958 - RNA, 21 nt, synthetic construct
  source 1..21: mol_type = other RNA
cgagcctggagttgagccaga

SEQ ID NO: 6959 - RNA, 21 nt, synthetic construct
  source 1..21: mol_type = other RNA
cgagcgcggggagacggagga

SEQ ID NO: 6960 - RNA, 21 nt, synthetic construct
  source 1..21: mol_type = other RNA
cgagcggaaacgccactgacc

SEQ ID NO: 6961 - RNA, 21 nt, synthetic construct
  source 1..21: mol_type = other RNA
cgagcggagggcagcaagagg

SEQ ID NO: 6962 - RNA, 21 nt, synthetic construct
  source 1..21: mol_type = other RNA
cgaggccgagcgccgcagtgt

SEQ ID NO: 6963 - RNA, 21 nt, synthetic construct
  source 1..21: mol_type = other RNA
cgaggctatctcagacacgct

SEQ ID NO: 6964 - RNA, 21 nt, synthetic construct
  source 1..21: mol_type = other RNA
cgaggctctctgaggagccgg

SEQ ID NO: 6965 - RNA, 21 nt, synthetic construct
  source 1..21: mol_type = other RNA
cgaggggggtgagaagtggca

SEQ ID NO: 6966 - RNA, 21 nt, synthetic construct
  source 1..21: mol_type = other RNA
cgagtcctgccgcctcccggg

SEQ ID NO: 6967 - RNA, 21 nt, synthetic construct
  source 1..21: mol_type = other RNA
cgagtctcacatgagcgaaac

SEQ ID NO: 6968 - RNA, 21 nt, synthetic construct
  source 1..21: mol_type = other RNA
cgagtgcctgtagcaggtcgg

SEQ ID NO: 6969 - RNA, 21 nt, synthetic construct
  source 1..21: mol_type = other RNA
cgagtgggccaatgggtgcgg

SEQ ID NO: 6970 - RNA, 21 nt, synthetic construct
  source 1..21: mol_type = other RNA
cgagttaggcccaacgcggcg

SEQ ID NO: 6971 - RNA, 21 nt, synthetic construct
  source 1..21: mol_type = other RNA
cgatcagagttgtctgtcaca

SEQ ID NO: 6972 - RNA, 21 nt, synthetic construct
  source 1..21: mol_type = other RNA
cgatcccccactccctacccc

SEQ ID NO: 6973 - RNA, 21 nt, synthetic construct
  source 1..21: mol_type = other RNA
cgatcgggccccaggggaggg

SEQ ID NO: 6974 - RNA, 21 nt, synthetic construct
  source 1..21: mol_type = other RNA
cgatcgtgaggttcggtctct

SEQ ID NO: 6975 - RNA, 21 nt, synthetic construct
  source 1..21: mol_type = other RNA
cgatctcccctccgtaatctt

SEQ ID NO: 6976 - RNA, 21 nt, synthetic construct
  source 1..21: mol_type = other RNA
cgatcttgtgagaatatcttc

SEQ ID NO: 6977 - RNA, 21 nt, synthetic construct
  source 1..21: mol_type = other RNA
cgattggccgtttctcctccc

SEQ ID NO: 6978 - RNA, 21 nt, synthetic construct
  source 1..21: mol_type = other RNA
cgatttacctacttgaaccag

SEQ ID NO: 6979 - RNA, 21 nt, synthetic construct
  source 1..21: mol_type = other RNA
cgatttcactgaccctcccct

SEQ ID NO: 6980 - RNA, 21 nt, synthetic construct
  source 1..21: mol_type = other RNA
cgcaacgtggcaggaagcgcg

SEQ ID NO: 6981 - RNA, 21 nt, synthetic construct
  source 1..21: mol_type = other RNA
cgcaagccaccagacggcccc

SEQ ID NO: 6982 - RNA, 21 nt, synthetic construct
  source 1..21: mol_type = other RNA
cgcacacccagcatctctaca

SEQ ID NO: 6983 - RNA, 21 nt, synthetic construct
  source 1..21: mol_type = other RNA
cgcacccattggcccactcgc

SEQ ID NO: 6984 - RNA, 21 nt, synthetic construct
  source 1..21: mol_type = other RNA
cgcacctcccctcccaccaga

SEQ ID NO: 6985 - RNA, 21 nt, synthetic construct
  source 1..21: mol_type = other RNA
cgcacggcactcccgggaggc

SEQ ID NO: 6986 - RNA, 21 nt, synthetic construct
  source 1..21: mol_type = other RNA
cgcacggggattcccagcgcc

SEQ ID NO: 6987 - RNA, 21 nt, synthetic construct
  source 1..21: mol_type = other RNA
cgcagagggaaagagaattca

SEQ ID NO: 6988 - RNA, 21 nt, synthetic construct
  source 1..21: mol_type = other RNA
cgcagagggaggagcgcttcc

SEQ ID NO: 6989 - RNA, 21 nt, synthetic construct
  source 1..21: mol_type = other RNA
cgcagccccagtcccgccagt

SEQ ID NO: 6990 - RNA, 21 nt, synthetic construct
  source 1..21: mol_type = other RNA
cgcagccgcttagcgactctc

SEQ ID NO: 6991 - RNA, 21 nt, synthetic construct
  source 1..21: mol_type = other RNA
cgcagggcgggcctccctccc

SEQ ID NO: 6992 - RNA, 21 nt, synthetic construct
  source 1..21: mol_type = other RNA
cgcagtggtttcgctcatgtg

SEQ ID NO: 6993 - RNA, 21 nt, synthetic construct
  source 1..21: mol_type = other RNA
cgcagtgtctggccccgcgcc

SEQ ID NO: 6994 - RNA, 21 nt, synthetic construct
  source 1..21: mol_type = other RNA
cgcatgagagggaaagttaaa

SEQ ID NO: 6995 - RNA, 21 nt, synthetic construct
  source 1..21: mol_type = other RNA
cgccaacacagtagtgccggc

SEQ ID NO: 6996 - RNA, 21 nt, synthetic construct
  source 1..21: mol_type = other RNA
cgccaatcagcggaagccgcc

SEQ ID NO: 6997 - RNA, 21 nt, synthetic construct
  source 1..21: mol_type = other RNA
cgccacccccaccacacgttc

SEQ ID NO: 6998 - RNA, 21 nt, synthetic construct
  source 1..21: mol_type = other RNA
cgccacccccgcgccccgcgc

SEQ ID NO: 6999 - RNA, 21 nt, synthetic construct
  source 1..21: mol_type = other RNA
cgccacggcgtttcctggccg

SEQ ID NO: 7000 - RNA, 21 nt, synthetic construct
  source 1..21: mol_type = other RNA
cgccacggggagccagagaac

SEQ ID NO: 7001 - RNA, 21 nt, synthetic construct
  source 1..21: mol_type = other RNA
cgccactgaccgcacggggat

SEQ ID NO: 7002 - RNA, 21 nt, synthetic construct
  source 1..21: mol_type = other RNA
cgccagagccgatttcactga

SEQ ID NO: 7003 - RNA, 21 nt, synthetic construct
  source 1..21: mol_type = other RNA
cgccagtccgccaacacagta

SEQ ID NO: 7004 - RNA, 21 nt, synthetic construct
  source 1..21: mol_type = other RNA
cgccatccagaagtctcggcc

SEQ ID NO: 7005 - RNA, 21 nt, synthetic construct
  source 1..21: mol_type = other RNA
cgccattggcctctccgccca

SEQ ID NO: 7006 - RNA, 21 nt, synthetic construct
  source 1..21: mol_type = other RNA
cgccatttgtgttttcacaca

SEQ ID NO: 7007 - RNA, 21 nt, synthetic construct
  source 1..21: mol_type = other RNA
cgcccaagaagtgagacaagc

SEQ ID NO: 7008 - RNA, 21 nt, synthetic construct
  source 1..21: mol_type = other RNA
cgcccaaggcaagtaaaacga

SEQ ID NO: 7009 - RNA, 21 nt, synthetic construct
  source 1..21: mol_type = other RNA
cgcccaccgccccgcacccat

SEQ ID NO: 7010 - RNA, 21 nt, synthetic construct
  source 1..21: mol_type = other RNA
cgccccacccagggggcaacg

SEQ ID NO: 7011 - RNA, 21 nt, synthetic construct
  source 1..21: mol_type = other RNA
cgccccctcccgccgcgccat

SEQ ID NO: 7012 - RNA, 21 nt, synthetic construct
  source 1..21: mol_type = other RNA
cgccccgcacccattggccca

SEQ ID NO: 7013 - RNA, 21 nt, synthetic construct
  source 1..21: mol_type = other RNA
cgccccgcgcagtggtttcgc

SEQ ID NO: 7014 - RNA, 21 nt, synthetic construct
  source 1..21: mol_type = other RNA
cgccccgggttcccaccgcct

SEQ ID NO: 7015 - RNA, 21 nt, synthetic construct
  source 1..21: mol_type = other RNA
cgcccctgcgcaacgtggcag

SEQ ID NO: 7016 - RNA, 21 nt, synthetic construct
  source 1..21: mol_type = other RNA
cgcccgcacacccagcatctc

SEQ ID NO: 7017 - RNA, 21 nt, synthetic construct
  source 1..21: mol_type = other RNA
cgcccgcctgcgctcagagac

SEQ ID NO: 7018 - RNA, 21 nt, synthetic construct
  source 1..21: mol_type = other RNA
cgcccgcgccagagccgattt

SEQ ID NO: 7019 - RNA, 21 nt, synthetic construct
  source 1..21: mol_type = other RNA
cgccctgcggcaaccggaggg

SEQ ID NO: 7020 - RNA, 21 nt, synthetic construct
  source 1..21: mol_type = other RNA
cgcccttcaggcggtgggaac

SEQ ID NO: 7021 - RNA, 21 nt, synthetic construct
  source 1..21: mol_type = other RNA
cgccgaagcacagcctcttct

SEQ ID NO: 7022 - RNA, 21 nt, synthetic construct
  source 1..21: mol_type = other RNA
cgccgattggccgtttctcct

SEQ ID NO: 7023 - RNA, 21 nt, synthetic construct
  source 1..21: mol_type = other RNA
cgccgccaatcagcggaagcc

SEQ ID NO: 7024 - RNA, 21 nt, synthetic construct
  source 1..21: mol_type = other RNA
cgccgccatccagaagtctcg

SEQ ID NO: 7025 - RNA, 21 nt, synthetic construct
  source 1..21: mol_type = other RNA
cgccgcccgcctgcgctcaga

SEQ ID NO: 7026 - RNA, 21 nt, synthetic construct
  source 1..21: mol_type = other RNA
cgccgcctgcttgtcttcgac

SEQ ID NO: 7027 - RNA, 21 nt, synthetic construct
  source 1..21: mol_type = other RNA
cgccgccttgcacacaccgtt

SEQ ID NO: 7028 - RNA, 21 nt, synthetic construct
  source 1..21: mol_type = other RNA
cgccgcgccattggcctctcc

SEQ ID NO: 7029 - RNA, 21 nt, synthetic construct
  source 1..21: mol_type = other RNA
cgccgcgttgggcctaactcg

SEQ ID NO: 7030 - RNA, 21 nt, synthetic construct
  source 1..21: mol_type = other RNA
cgccggcgctgggaatccccg

SEQ ID NO: 7031 - RNA, 21 nt, synthetic construct
  source 1..21: mol_type = other RNA
cgccggggccgcctagagaag

SEQ ID NO: 7032 - RNA, 21 nt, synthetic construct
  source 1..21: mol_type = other RNA
cgccgtcgggagtacgcagcc

SEQ ID NO: 7033 - RNA, 21 nt, synthetic construct
  source 1..21: mol_type = other RNA
cgccgtggcgccgcgttgggc

SEQ ID NO: 7034 - RNA, 21 nt, synthetic construct
  source 1..21: mol_type = other RNA
cgccgtgtgtgaaaacacaaa

SEQ ID NO: 7035 - RNA, 21 nt, synthetic construct
  source 1..21: mol_type = other RNA
cgcctagagaagaggctgtgc

SEQ ID NO: 7036 - RNA, 21 nt, synthetic construct
  source 1..21: mol_type = other RNA
cgcctagattagagggggatc

SEQ ID NO: 7037 - RNA, 21 nt, synthetic construct
  source 1..21: mol_type = other RNA
cgcctccagcgcgcgcttcct

SEQ ID NO: 7038 - RNA, 21 nt, synthetic construct
  source 1..21: mol_type = other RNA
cgcctcttcaccccctttcct

SEQ ID NO: 7039 - RNA, 21 nt, synthetic construct
  source 1..21: mol_type = other RNA
cgcctgaagggcgagacaagc

SEQ ID NO: 7040 - RNA, 21 nt, synthetic construct
  source 1..21: mol_type = other RNA
cgcctgcatccagccacccct

SEQ ID NO: 7041 - RNA, 21 nt, synthetic construct
  source 1..21: mol_type = other RNA
cgcctgcgctcagagactcac

SEQ ID NO: 7042 - RNA, 21 nt, synthetic construct
  source 1..21: mol_type = other RNA
cgcctgcttgtcttcgacacc

SEQ ID NO: 7043 - RNA, 21 nt, synthetic construct
  source 1..21: mol_type = other RNA
cgcctgggacaaggtaagggt

SEQ ID NO: 7044 - RNA, 21 nt, synthetic construct
  source 1..21: mol_type = other RNA
cgccttccctctcgttttctg

SEQ ID NO: 7045 - RNA, 21 nt, synthetic construct
  source 1..21: mol_type = other RNA
cgccttgcacacaccgttgca

SEQ ID NO: 7046 - RNA, 21 nt, synthetic construct
  source 1..21: mol_type = other RNA
cgcctttctgccccccacccc

SEQ ID NO: 7047 - RNA, 21 nt, synthetic construct
  source 1..21: mol_type = other RNA
cgcctttggctcgctccgcct

SEQ ID NO: 7048 - RNA, 21 nt, synthetic construct
  source 1..21: mol_type = other RNA
cgcgagaacgggggtagggag

SEQ ID NO: 7049 - RNA, 21 nt, synthetic construct
  source 1..21: mol_type = other RNA
cgcgagagtcgctaagcggct

SEQ ID NO: 7050 - RNA, 21 nt, synthetic construct
  source 1..21: mol_type = other RNA
cgcgatctcccctccgtaatc

SEQ ID NO: 7051 - RNA, 21 nt, synthetic construct
  source 1..21: mol_type = other RNA
cgcgcagtggtttcgctcatg

SEQ ID NO: 7052 - RNA, 21 nt, synthetic construct
  source 1..21: mol_type = other RNA
cgcgccagagccgatttcact

SEQ ID NO: 7053 - RNA, 21 nt, synthetic construct
  source 1..21: mol_type = other RNA
cgcgccattggcctctccgcc

SEQ ID NO: 7054 - RNA, 21 nt, synthetic construct
  source 1..21: mol_type = other RNA
cgcgccccgcgcagtggtttc

SEQ ID NO: 7055 - RNA, 21 nt, synthetic construct
  source 1..21: mol_type = other RNA
cgcgcccctgcgcaacgtggc

SEQ ID NO: 7056 - RNA, 21 nt, synthetic construct
  source 1..21: mol_type = other RNA
cgcgcccgcacacccagcatc

SEQ ID NO: 7057 - RNA, 21 nt, synthetic construct
  source 1..21: mol_type = other RNA
cgcgcgcttcctgccacgttg

SEQ ID NO: 7058 - RNA, 21 nt, synthetic construct
  source 1..21: mol_type = other RNA
cgcgctcgctctccttgggtc

SEQ ID NO: 7059 - RNA, 21 nt, synthetic construct
  source 1..21: mol_type = other RNA
cgcgcttcctgccacgttgcg

SEQ ID NO: 7060 - RNA, 21 nt, synthetic construct
  source 1..21: mol_type = other RNA
cgcggcccccagagcgatcag

SEQ ID NO: 7061 - RNA, 21 nt, synthetic construct
  source 1..21: mol_type = other RNA
cgcggccgccgccatccagaa

SEQ ID NO: 7062 - RNA, 21 nt, synthetic construct
  source 1..21: mol_type = other RNA
cgcggccttgtgacagacaac

SEQ ID NO: 7063 - RNA, 21 nt, synthetic construct
  source 1..21: mol_type = other RNA
cgcggcgccacggcgtttcct

SEQ ID NO: 7064 - RNA, 21 nt, synthetic construct
  source 1..21: mol_type = other RNA
cgcgggcgtcctcccaccctc

SEQ ID NO: 7065 - RNA, 21 nt, synthetic construct
  source 1..21: mol_type = other RNA
cgcggggagacggaggaggtg

SEQ ID NO: 7066 - RNA, 21 nt, synthetic construct
  source 1..21: mol_type = other RNA
cgcgttgccccctgggtgggg

SEQ ID NO: 7067 - RNA, 21 nt, synthetic construct
  source 1..21: mol_type = other RNA
cgcgttgggcctaactcgagt

SEQ ID NO: 7068 - RNA, 21 nt, synthetic construct
  source 1..21: mol_type = other RNA
cgctaagcggctgcgtactcc

SEQ ID NO: 7069 - RNA, 21 nt, synthetic construct
  source 1..21: mol_type = other RNA
cgctcagagactcacgcagcc

SEQ ID NO: 7070 - RNA, 21 nt, synthetic construct
  source 1..21: mol_type = other RNA
cgctcatgtgagactcgagcc

SEQ ID NO: 7071 - RNA, 21 nt, synthetic construct
  source 1..21: mol_type = other RNA
cgctcccctacctagccgagg

SEQ ID NO: 7072 - RNA, 21 nt, synthetic construct
  source 1..21: mol_type = other RNA
cgctcccttctccctccccct

SEQ ID NO: 7073 - RNA, 21 nt, synthetic construct
  source 1..21: mol_type = other RNA
cgctccgcctttctgcccccc

SEQ ID NO: 7074 - RNA, 21 nt, synthetic construct
  source 1..21: mol_type = other RNA
cgctccggctcctcagagagc

SEQ ID NO: 7075 - RNA, 21 nt, synthetic construct
  source 1..21: mol_type = other RNA
cgctcctcccccacccccacg

SEQ ID NO: 7076 - RNA, 21 nt, synthetic construct
  source 1..21: mol_type = other RNA
cgctcctccctctgcgagagc

SEQ ID NO: 7077 - RNA, 21 nt, synthetic construct
  source 1..21: mol_type = other RNA
cgctcgctctccttgggtcgt

SEQ ID NO: 7078 - RNA, 21 nt, synthetic construct
  source 1..21: mol_type = other RNA
cgctcggcctcggggaggacc

SEQ ID NO: 7079 - RNA, 21 nt, synthetic construct
  source 1..21: mol_type = other RNA
cgctcgggcagcgggctgagt

SEQ ID NO: 7080 - RNA, 21 nt, synthetic construct
  source 1..21: mol_type = other RNA
cgctctccttgggtcgtgggc

SEQ ID NO: 7081 - RNA, 21 nt, synthetic construct
  source 1..21: mol_type = other RNA
cgctctgggggccgcgatctc

SEQ ID NO: 7082 - RNA, 21 nt, synthetic construct
  source 1..21: mol_type = other RNA
cgctgattggcggcgagtggg

SEQ ID NO: 7083 - RNA, 21 nt, synthetic construct
  source 1..21: mol_type = other RNA
cgctgcccgagcggaaacgcc

SEQ ID NO: 7084 - RNA, 21 nt, synthetic construct
  source 1..21: mol_type = other RNA
cgctgggaatccccgtgcggt

SEQ ID NO: 7085 - RNA, 21 nt, synthetic construct
  source 1..21: mol_type = other RNA
cgctgtggcacacgccacggg

SEQ ID NO: 7086 - RNA, 21 nt, synthetic construct
  source 1..21: mol_type = other RNA
cgcttagcgactctcgcgttg

SEQ ID NO: 7087 - RNA, 21 nt, synthetic construct
  source 1..21: mol_type = other RNA
cgcttcccctcccccaacgcc

SEQ ID NO: 7088 - RNA, 21 nt, synthetic construct
  source 1..21: mol_type = other RNA
cgcttccggctagcctcttgt

SEQ ID NO: 7089 - RNA, 21 nt, synthetic construct
  source 1..21: mol_type = other RNA
cgcttcctgccacgttgcgca

SEQ ID NO: 7090 - RNA, 21 nt, synthetic construct
  source 1..21: mol_type = other RNA
cggaaaatgctcgaaaccgga

SEQ ID NO: 7091 - RNA, 21 nt, synthetic construct
  source 1..21: mol_type = other RNA
cggaaacgccactgaccgcac

SEQ ID NO: 7092 - RNA, 21 nt, synthetic construct
  source 1..21: mol_type = other RNA
cggaactctggtgggagggga

SEQ ID NO: 7093 - RNA, 21 nt, synthetic construct
  source 1..21: mol_type = other RNA
cggaagccgccggggccgcct

SEQ ID NO: 7094 - RNA, 21 nt, synthetic construct
  source 1..21: mol_type = other RNA
cggaagcgctcctccctctgc

SEQ ID NO: 7095 - RNA, 21 nt, synthetic construct
  source 1..21: mol_type = other RNA
cggacccttaccttgtcccag

SEQ ID NO: 7096 - RNA, 21 nt, synthetic construct
  source 1..21: mol_type = other RNA
cggacggagccattgctctcg

SEQ ID NO: 7097 - RNA, 21 nt, synthetic construct
  source 1..21: mol_type = other RNA
cggactggcgggactggggct

SEQ ID NO: 7098 - RNA, 21 nt, synthetic construct
  source 1..21: mol_type = other RNA
cggagaggccaatggcgcggc

SEQ ID NO: 7099 - RNA, 21 nt, synthetic construct
  source 1..21: mol_type = other RNA
cggagccattgctctcgcaga

SEQ ID NO: 7100 - RNA, 21 nt, synthetic construct
  source 1..21: mol_type = other RNA
cggagccgcggccgccgccat

SEQ ID NO: 7101 - RNA, 21 nt, synthetic construct
  source 1..21: mol_type = other RNA
cggagcgccgaagcacagcct

SEQ ID NO: 7102 - RNA, 21 nt, synthetic construct
  source 1..21: mol_type = other RNA
cggaggaggtgacccttccct

SEQ ID NO: 7103 - RNA, 21 nt, synthetic construct
  source 1..21: mol_type = other RNA
cggagggcagcaagaggcctc

SEQ ID NO: 7104 - RNA, 21 nt, synthetic construct
  source 1..21: mol_type = other RNA
cggaggggagatcgcggcccc

SEQ ID NO: 7105 - RNA, 21 nt, synthetic construct
  source 1..21: mol_type = other RNA
cggagggggagggagaaggga

SEQ ID NO: 7106 - RNA, 21 nt, synthetic construct
  source 1..21: mol_type = other RNA
cggcaaccggagggggaggga

SEQ ID NO: 7107 - RNA, 21 nt, synthetic construct
  source 1..21: mol_type = other RNA
cggcactactgtgttggcgga

SEQ ID NO: 7108 - RNA, 21 nt, synthetic construct
  source 1..21: mol_type = other RNA
cggcactcccgggaggcggca

SEQ ID NO: 7109 - RNA, 21 nt, synthetic construct
  source 1..21: mol_type = other RNA
cggcagcgcctgggacaaggt

SEQ ID NO: 7110 - RNA, 21 nt, synthetic construct
  source 1..21: mol_type = other RNA
cggcagctcactcagcccgct

SEQ ID NO: 7111 - RNA, 21 nt, synthetic construct
  source 1..21: mol_type = other RNA
cggcaggactcgagttaggcc

SEQ ID NO: 7112 - RNA, 21 nt, synthetic construct
  source 1..21: mol_type = other RNA
cggccaatcggcgacaagagg

SEQ ID NO: 7113 - RNA, 21 nt, synthetic construct
  source 1..21: mol_type = other RNA
cggccaggaaacgccgtggcg

SEQ ID NO: 7114 - RNA, 21 nt, synthetic construct
  source 1..21: mol_type = other RNA
cggcccccagagcgatcagag

SEQ ID NO: 7115 - RNA, 21 nt, synthetic construct
  source 1..21: mol_type = other RNA
cggcccccctagccacccatc

SEQ ID NO: 7116 - RNA, 21 nt, synthetic construct
  source 1..21: mol_type = other RNA
cggcccccctctttccctggc

SEQ ID NO: 7117 - RNA, 21 nt, synthetic construct
  source 1..21: mol_type = other RNA
cggccccggcggcttccgctg

SEQ ID NO: 7118 - RNA, 21 nt, synthetic construct
  source 1..21: mol_type = other RNA
cggccgagacttctggatggc

SEQ ID NO: 7119 - RNA, 21 nt, synthetic construct
  source 1..21: mol_type = other RNA
cggccgccgccatccagaagt

SEQ ID NO: 7120 - RNA, 21 nt, synthetic construct
  source 1..21: mol_type = other RNA
cggccgccgcccgcctgcgct

SEQ ID NO: 7121 - RNA, 21 nt, synthetic construct
  source 1..21: mol_type = other RNA
cggccgcgcccgcacacccag

SEQ ID NO: 7122 - RNA, 21 nt, synthetic construct
  source 1..21: mol_type = other RNA
cggcctcctgcggcgggaggg

SEQ ID NO: 7123 - RNA, 21 nt, synthetic construct
  source 1..21: mol_type = other RNA
cggcctcggggaggaccgtac

SEQ ID NO: 7124 - RNA, 21 nt, synthetic construct
  source 1..21: mol_type = other RNA
cggccttgtgacagacaactc

SEQ ID NO: 7125 - RNA, 21 nt, synthetic construct
  source 1..21: mol_type = other RNA
cggcgacaagaggctagccgg

SEQ ID NO: 7126 - RNA, 21 nt, synthetic construct
  source 1..21: mol_type = other RNA
cggcgaggggggtgagaagtg

SEQ ID NO: 7127 - RNA, 21 nt, synthetic construct
  source 1..21: mol_type = other RNA
cggcgagtgggccaatgggtg

SEQ ID NO: 7128 - RNA, 21 nt, synthetic construct
  source 1..21: mol_type = other RNA
cggcgccacggcgtttcctgg

SEQ ID NO: 7129 - RNA, 21 nt, synthetic construct
  source 1..21: mol_type = other RNA
cggcgctccggctcctcagag

SEQ ID NO: 7130 - RNA, 21 nt, synthetic construct
  source 1..21: mol_type = other RNA
cggcgctcggcctcggggagg

SEQ ID NO: 7131 - RNA, 21 nt, synthetic construct
  source 1..21: mol_type = other RNA
cggcgctgggaatccccgtgc

SEQ ID NO: 7132 - RNA, 21 nt, synthetic construct
  source 1..21: mol_type = other RNA
cggcggcagctcactcagccc

SEQ ID NO: 7133 - RNA, 21 nt, synthetic construct
  source 1..21: mol_type = other RNA
cggcggcggcagctcactcag

SEQ ID NO: 7134 - RNA, 21 nt, synthetic construct
  source 1..21: mol_type = other RNA
cggcggcttccgctgattggc

SEQ ID NO: 7135 - RNA, 21 nt, synthetic construct
  source 1..21: mol_type = other RNA
cggcgggaggagaaacggcca

SEQ ID NO: 7136 - RNA, 21 nt, synthetic construct
  source 1..21: mol_type = other RNA
cggcgggaggggagggtcagt

SEQ ID NO: 7137 - RNA, 21 nt, synthetic construct
  source 1..21: mol_type = other RNA
cggcgggtaaaccgactcccc

SEQ ID NO: 7138 - RNA, 21 nt, synthetic construct
  source 1..21: mol_type = other RNA
cggcgtaactgacaggagctt

SEQ ID NO: 7139 - RNA, 21 nt, synthetic construct
  source 1..21: mol_type = other RNA
cggcgtttcctggccgggaat

SEQ ID NO: 7140 - RNA, 21 nt, synthetic construct
  source 1..21: mol_type = other RNA
cggctagcctcttgtcgccga

SEQ ID NO: 7141 - RNA, 21 nt, synthetic construct
  source 1..21: mol_type = other RNA
cggctaggtaggggagcggaa

SEQ ID NO: 7142 - RNA, 21 nt, synthetic construct
  source 1..21: mol_type = other RNA
cggctccgccccgggttccca

SEQ ID NO: 7143 - RNA, 21 nt, synthetic construct
  source 1..21: mol_type = other RNA
cggctcctcagagagcctcgg

SEQ ID NO: 7144 - RNA, 21 nt, synthetic construct
  source 1..21: mol_type = other RNA
cggctctggcgcgggcgtcct

SEQ ID NO: 7145 - RNA, 21 nt, synthetic construct
  source 1..21: mol_type = other RNA
cggctgcgtactcccgacggc

SEQ ID NO: 7146 - RNA, 21 nt, synthetic construct
  source 1..21: mol_type = other RNA
cggcttccgctgattggcggc

SEQ ID NO: 7147 - RNA, 21 nt, synthetic construct
  source 1..21: mol_type = other RNA
cgggaaaggcaacccccgcaa

SEQ ID NO: 7148 - RNA, 21 nt, synthetic construct
  source 1..21: mol_type = other RNA
cgggaacataatgtttgttac

SEQ ID NO: 7149 - RNA, 21 nt, synthetic construct
  source 1..21: mol_type = other RNA
cgggaatggcccgtacccgtg

SEQ ID NO: 7150 - RNA, 21 nt, synthetic construct
  source 1..21: mol_type = other RNA
cgggaatgtgaagaggagtgt

SEQ ID NO: 7151 - RNA, 21 nt, synthetic construct
  source 1..21: mol_type = other RNA
cgggacacgccccctcccgcc

SEQ ID NO: 7152 - RNA, 21 nt, synthetic construct
  source 1..21: mol_type = other RNA
cgggactggggctgcgtgagt

SEQ ID NO: 7153 - RNA, 21 nt, synthetic construct
  source 1..21: mol_type = other RNA
cgggaggagaaacggccaatc

SEQ ID NO: 7154 - RNA, 21 nt, synthetic construct
  source 1..21: mol_type = other RNA
cgggaggcggcaggactcgag

SEQ ID NO: 7155 - RNA, 21 nt, synthetic construct
  source 1..21: mol_type = other RNA
cgggaggggagggtcagtgaa

SEQ ID NO: 7156 - RNA, 21 nt, synthetic construct
  source 1..21: mol_type = other RNA
cgggagtacgcagccgcttag

SEQ ID NO: 7157 - RNA, 21 nt, synthetic construct
  source 1..21: mol_type = other RNA
cgggcagcgggctgagtgagc

SEQ ID NO: 7158 - RNA, 21 nt, synthetic construct
  source 1..21: mol_type = other RNA
cgggccattcccggccaggaa

SEQ ID NO: 7159 - RNA, 21 nt, synthetic construct
  source 1..21: mol_type = other RNA
cgggccccaggggagggaagg

SEQ ID NO: 7160 - RNA, 21 nt, synthetic construct
  source 1..21: mol_type = other RNA
cgggcccttgctactggctcg

SEQ ID NO: 7161 - RNA, 21 nt, synthetic construct
  source 1..21: mol_type = other RNA
cgggcctccctcccgcctgca

SEQ ID NO: 7162 - RNA, 21 nt, synthetic construct
  source 1..21: mol_type = other RNA
cgggcgtcctcccaccctccc

SEQ ID NO: 7163 - RNA, 21 nt, synthetic construct
  source 1..21: mol_type = other RNA
cgggcgttggtacggtcctcc

SEQ ID NO: 7164 - RNA, 21 nt, synthetic construct
  source 1..21: mol_type = other RNA
cgggctgccggccgagacttc

SEQ ID NO: 7165 - RNA, 21 nt, synthetic construct
  source 1..21: mol_type = other RNA
cgggcttgtctcgcccttcag

SEQ ID NO: 7166 - RNA, 21 nt, synthetic construct
  source 1..21: mol_type = other RNA
cggggagacggaggaggtgac

SEQ ID NO: 7167 - RNA, 21 nt, synthetic construct
  source 1..21: mol_type = other RNA
cggggagccagagaacgtgtg

SEQ ID NO: 7168 - RNA, 21 nt, synthetic construct
  source 1..21: mol_type = other RNA
cggggaggaccgtaccaacgc

SEQ ID NO: 7169 - RNA, 21 nt, synthetic construct
  source 1..21: mol_type = other RNA
cggggaggcgggcgttggtac

SEQ ID NO: 7170 - RNA, 21 nt, synthetic construct
  source 1..21: mol_type = other RNA
cggggccagacactgcggcgc

SEQ ID NO: 7171 - RNA, 21 nt, synthetic construct
  source 1..21: mol_type = other RNA
cggggccgcctagagaagagg

SEQ ID NO: 7172 - RNA, 21 nt, synthetic construct
  source 1..21: mol_type = other RNA
cggggcggtgggcggagaggc

SEQ ID NO: 7173 - RNA, 21 nt, synthetic construct
  source 1..21: mol_type = other RNA
cgggggagtcggtttacccgc

SEQ ID NO: 7174 - RNA, 21 nt, synthetic construct
  source 1..21: mol_type = other RNA
cgggggcgggctgccggccga

SEQ ID NO: 7175 - RNA, 21 nt, synthetic construct
  source 1..21: mol_type = other RNA
cgggggtagggagtgggggat

SEQ ID NO: 7176 - RNA, 21 nt, synthetic construct
  source 1..21: mol_type = other RNA
cgggggtggcggggaggcggg

SEQ ID NO: 7177 - RNA, 21 nt, synthetic construct
  source 1..21: mol_type = other RNA
cgggggttgcctttcccgtgg

SEQ ID NO: 7178 - RNA, 21 nt, synthetic construct
  source 1..21: mol_type = other RNA
cgggtaaaccgactcccccga

SEQ ID NO: 7179 - RNA, 21 nt, synthetic construct
  source 1..21: mol_type = other RNA
cgggtacgggccattcccggc

SEQ ID NO: 7180 - RNA, 21 nt, synthetic construct
  source 1..21: mol_type = other RNA
cgggtaggtaggtggggtgta

SEQ ID NO: 7181 - RNA, 21 nt, synthetic construct
  source 1..21: mol_type = other RNA
cgggtgcccctggcgccggcg

SEQ ID NO: 7182 - RNA, 21 nt, synthetic construct
  source 1..21: mol_type = other RNA
cgggttcccaccgcctgaagg

SEQ ID NO: 7183 - RNA, 21 nt, synthetic construct
  source 1..21: mol_type = other RNA
cggtacactggggggatgggt

SEQ ID NO: 7184 - RNA, 21 nt, synthetic construct
  source 1..21: mol_type = other RNA
cggtcagtggcgtttccgctc

SEQ ID NO: 7185 - RNA, 21 nt, synthetic construct
  source 1..21: mol_type = other RNA
cggtcccacagcttcgacagc

SEQ ID NO: 7186 - RNA, 21 nt, synthetic construct
  source 1..21: mol_type = other RNA
cggtcctccccgaggccgagc

SEQ ID NO: 7187 - RNA, 21 nt, synthetic construct
  source 1..21: mol_type = other RNA
cggtctcttttctgtcggacc

SEQ ID NO: 7188 - RNA, 21 nt, synthetic construct
  source 1..21: mol_type = other RNA
cggtgggcggagaggccaatg

SEQ ID NO: 7189 - RNA, 21 nt, synthetic construct
  source 1..21: mol_type = other RNA
cggtgtgtgcaaggcggcgag

SEQ ID NO: 7190 - RNA, 21 nt, synthetic construct
  source 1..21: mol_type = other RNA
cggtttacccgccgcctgctt

SEQ ID NO: 7191 - RNA, 21 nt, synthetic construct
  source 1..21: mol_type = other RNA
cggtttcgagcattttccgct

SEQ ID NO: 7192 - RNA, 21 nt, synthetic construct
  source 1..21: mol_type = other RNA
cgtaacaaacattatgttccc

SEQ ID NO: 7193 - RNA, 21 nt, synthetic construct
  source 1..21: mol_type = other RNA
cgtaactgacaggagctttac

SEQ ID NO: 7194 - RNA, 21 nt, synthetic construct
  source 1..21: mol_type = other RNA
cgtaatcttcctggacgcctt

SEQ ID NO: 7195 - RNA, 21 nt, synthetic construct
  source 1..21: mol_type = other RNA
cgtaccaacgcccgcctcccc

SEQ ID NO: 7196 - RNA, 21 nt, synthetic construct
  source 1..21: mol_type = other RNA
cgtacccgtgaggtgggggtg

SEQ ID NO: 7197 - RNA, 21 nt, synthetic construct
  source 1..21: mol_type = other RNA
cgtactcccgacggcgtaact

SEQ ID NO: 7198 - RNA, 21 nt, synthetic construct
  source 1..21: mol_type = other RNA
cgtattctggttggagtaaag

SEQ ID NO: 7199 - RNA, 21 nt, synthetic construct
  source 1..21: mol_type = other RNA
cgtcagtggtctttctcttgg

SEQ ID NO: 7200 - RNA, 21 nt, synthetic construct
  source 1..21: mol_type = other RNA
cgtccaggaagattacggagg

SEQ ID NO: 7201 - RNA, 21 nt, synthetic construct
  source 1..21: mol_type = other RNA
cgtccggtttcgagcattttc

SEQ ID NO: 7202 - RNA, 21 nt, synthetic construct
  source 1..21: mol_type = other RNA
cgtcctcccaccctccccttc

SEQ ID NO: 7203 - RNA, 21 nt, synthetic construct
  source 1..21: mol_type = other RNA
cgtcctgacccaggaaaaaca

SEQ ID NO: 7204 - RNA, 21 nt, synthetic construct
  source 1..21: mol_type = other RNA
cgtcgggagtacgcagccgct

SEQ ID NO: 7205 - RNA, 21 nt, synthetic construct
  source 1..21: mol_type = other RNA
cgtctccccgcgctcgctctc

SEQ ID NO: 7206 - RNA, 21 nt, synthetic construct
  source 1..21: mol_type = other RNA
cgtctggtggcttgcgggggt

SEQ ID NO: 7207 - RNA, 21 nt, synthetic construct
  source 1..21: mol_type = other RNA
cgtgaggtgggggtggggggc

SEQ ID NO: 7208 - RNA, 21 nt, synthetic construct
  source 1..21: mol_type = other RNA
cgtgaggttcggtctcttttc

SEQ ID NO: 7209 - RNA, 21 nt, synthetic construct
  source 1..21: mol_type = other RNA
cgtgagtctctgagcgcaggc

SEQ ID NO: 7210 - RNA, 21 nt, synthetic construct
  source 1..21: mol_type = other RNA
cgtgcggtcagtggcgtttcc

SEQ ID NO: 7211 - RNA, 21 nt, synthetic construct
  source 1..21: mol_type = other RNA
cgtggagaacgatcttgtgag

SEQ ID NO: 7212 - RNA, 21 nt, synthetic construct
  source 1..21: mol_type = other RNA
cgtggagtaggcagttcccag

SEQ ID NO: 7213 - RNA, 21 nt, synthetic construct
  source 1..21: mol_type = other RNA
cgtggcaggaagcgcgcgctg

SEQ ID NO: 7214 - RNA, 21 nt, synthetic construct
  source 1..21: mol_type = other RNA
cgtggcgccgcgttgggccta

SEQ ID NO: 7215 - RNA, 21 nt, synthetic construct
  source 1..21: mol_type = other RNA
cgtggcgtgtgccacagcgtg

SEQ ID NO: 7216 - RNA, 21 nt, synthetic construct
  source 1..21: mol_type = other RNA
cgtgggaagtcgggaacataa

SEQ ID NO: 7217 - RNA, 21 nt, synthetic construct
  source 1..21: mol_type = other RNA
cgtgggcctggccctccccaa

SEQ ID NO: 7218 - RNA, 21 nt, synthetic construct
  source 1..21: mol_type = other RNA
cgtgtaagtcgggaatgtgaa

SEQ ID NO: 7219 - RNA, 21 nt, synthetic construct
  source 1..21: mol_type = other RNA
cgtgtctgagatagcctcgtt

SEQ ID NO: 7220 - RNA, 21 nt, synthetic construct
  source 1..21: mol_type = other RNA
cgtgtgccacagcgtgtctga

SEQ ID NO: 7221 - RNA, 21 nt, synthetic construct
  source 1..21: mol_type = other RNA
cgtgtggtgggggtggcgaag

SEQ ID NO: 7222 - RNA, 21 nt, synthetic construct
  source 1..21: mol_type = other RNA
cgtgtgtgaaaacacaaatgg

SEQ ID NO: 7223 - RNA, 21 nt, synthetic construct
  source 1..21: mol_type = other RNA
cgttctccacgcccaaggcaa

SEQ ID NO: 7224 - RNA, 21 nt, synthetic construct
  source 1..21: mol_type = other RNA
cgttctcgcggccttgtgaca

SEQ ID NO: 7225 - RNA, 21 nt, synthetic construct
  source 1..21: mol_type = other RNA
cgttctctggctccccgtggc

SEQ ID NO: 7226 - RNA, 21 nt, synthetic construct
  source 1..21: mol_type = other RNA
cgttgaatgtgtagggttcga

SEQ ID NO: 7227 - RNA, 21 nt, synthetic construct
  source 1..21: mol_type = other RNA
cgttgcaacaccccattttcc

SEQ ID NO: 7228 - RNA, 21 nt, synthetic construct
  source 1..21: mol_type = other RNA
cgttgccccctgggtggggcg

SEQ ID NO: 7229 - RNA, 21 nt, synthetic construct
  source 1..21: mol_type = other RNA
cgttgcgcaggggcgcggggc

SEQ ID NO: 7230 - RNA, 21 nt, synthetic construct
  source 1..21: mol_type = other RNA
cgttgggagggaaaggggtgg

SEQ ID NO: 7231 - RNA, 21 nt, synthetic construct
  source 1..21: mol_type = other RNA
cgttgggcctaactcgagtcc

SEQ ID NO: 7232 - RNA, 21 nt, synthetic construct
  source 1..21: mol_type = other RNA
cgttgggggaggggaagcgtc

SEQ ID NO: 7233 - RNA, 21 nt, synthetic construct
  source 1..21: mol_type = other RNA
cgttggtacggtcctccccga

SEQ ID NO: 7234 - RNA, 21 nt, synthetic construct
  source 1..21: mol_type = other RNA
cgtttacctttcccttgagga

SEQ ID NO: 7235 - RNA, 21 nt, synthetic construct
  source 1..21: mol_type = other RNA
cgtttccgctcgggcagcggg

SEQ ID NO: 7236 - RNA, 21 nt, synthetic construct
  source 1..21: mol_type = other RNA
cgtttcctggccgggaatggc

SEQ ID NO: 7237 - RNA, 21 nt, synthetic construct
  source 1..21: mol_type = other RNA
cgtttctcctcccgccgtgtg

SEQ ID NO: 7238 - RNA, 21 nt, synthetic construct
  source 1..21: mol_type = other RNA
cgttttacttgccttgggcgt

SEQ ID NO: 7239 - RNA, 21 nt, synthetic construct
  source 1..21: mol_type = other RNA
cgttttctggcttcccacctc

SEQ ID NO: 7240 - RNA, 21 nt, synthetic construct
  source 1..21: mol_type = other RNA
ctaactcgagtcctgccgcct

SEQ ID NO: 7241 - RNA, 21 nt, synthetic construct
  source 1..21: mol_type = other RNA
ctaagagcttggggagggcca

SEQ ID NO: 7242 - RNA, 21 nt, synthetic construct
  source 1..21: mol_type = other RNA
ctaagcggctgcgtactcccg

SEQ ID NO: 7243 - RNA, 21 nt, synthetic construct
  source 1..21: mol_type = other RNA
ctaatctaggcgacccaactc

SEQ ID NO: 7244 - RNA, 21 nt, synthetic construct
  source 1..21: mol_type = other RNA
ctaattgattctatagagtcc

SEQ ID NO: 7245 - RNA, 21 nt, synthetic construct
  source 1..21: mol_type = other RNA
ctacacattcaacgaggctat

SEQ ID NO: 7246 - RNA, 21 nt, synthetic construct
  source 1..21: mol_type = other RNA
ctacaccccacctacctaccc

SEQ ID NO: 7247 - RNA, 21 nt, synthetic construct
  source 1..21: mol_type = other RNA
ctacactcctcttcacattcc

SEQ ID NO: 7248 - RNA, 21 nt, synthetic construct
  source 1..21: mol_type = other RNA
ctacaggcactcgtgggggtg

SEQ ID NO: 7249 - RNA, 21 nt, synthetic construct
  source 1..21: mol_type = other RNA
ctacccccgttctcgcggcct

SEQ ID NO: 7250 - RNA, 21 nt, synthetic construct
  source 1..21: mol_type = other RNA
ctacccgccccacccaggggg

SEQ ID NO: 7251 - RNA, 21 nt, synthetic construct
  source 1..21: mol_type = other RNA
ctacctacccgccccacccag

SEQ ID NO: 7252 - RNA, 21 nt, synthetic construct
  source 1..21: mol_type = other RNA
ctacctagccgaggctctctg

SEQ ID NO: 7253 - RNA, 21 nt, synthetic construct
  source 1..21: mol_type = other RNA
ctactccacgtttacctttcc

SEQ ID NO: 7254 - RNA, 21 nt, synthetic construct
  source 1..21: mol_type = other RNA
ctactggctcgagtctcacat

SEQ ID NO: 7255 - RNA, 21 nt, synthetic construct
  source 1..21: mol_type = other RNA
ctactgtgttggcggactggc

SEQ ID NO: 7256 - RNA, 21 nt, synthetic construct
  source 1..21: mol_type = other RNA
ctacttgaaccagggctcttt

SEQ ID NO: 7257 - RNA, 21 nt, synthetic construct
  source 1..21: mol_type = other RNA
ctagagaagaggctgtgcttc

SEQ ID NO: 7258 - RNA, 21 nt, synthetic construct
  source 1..21: mol_type = other RNA
ctagattagagggggatctct

SEQ ID NO: 7259 - RNA, 21 nt, synthetic construct
  source 1..21: mol_type = other RNA
ctagccacccatccccccagt

SEQ ID NO: 7260 - RNA, 21 nt, synthetic construct
  source 1..21: mol_type = other RNA
ctagccgaggctctctgagga

SEQ ID NO: 7261 - RNA, 21 nt, synthetic construct
  source 1..21: mol_type = other RNA
ctagccggaagcgctcctccc

SEQ ID NO: 7262 - RNA, 21 nt, synthetic construct
  source 1..21: mol_type = other RNA
ctagcctcttgtcgccgattg

SEQ ID NO: 7263 - RNA, 21 nt, synthetic construct
  source 1..21: mol_type = other RNA
ctaggcgacccaactccccct

SEQ ID NO: 7264 - RNA, 21 nt, synthetic construct
  source 1..21: mol_type = other RNA
ctaggcggccccggcggcttc

SEQ ID NO: 7265 - RNA, 21 nt, synthetic construct
  source 1..21: mol_type = other RNA
ctaggggggccgtctggtggc

SEQ ID NO: 7266 - RNA, 21 nt, synthetic construct
  source 1..21: mol_type = other RNA
ctaggtaggggagcggaactc

SEQ ID NO: 7267 - RNA, 21 nt, synthetic construct
  source 1..21: mol_type = other RNA
ctatagaatcaattagcatag

SEQ ID NO: 7268 - RNA, 21 nt, synthetic construct
  source 1..21: mol_type = other RNA
ctatagagtccttgcttgtct

SEQ ID NO: 7269 - RNA, 21 nt, synthetic construct
  source 1..21: mol_type = other RNA
ctatctcagacacgctgtggc

SEQ ID NO: 7270 - RNA, 21 nt, synthetic construct
  source 1..21: mol_type = other RNA
ctatgctaattgattctatag

SEQ ID NO: 7271 - RNA, 21 nt, synthetic construct
  source 1..21: mol_type = other RNA
ctcaactccaggctcgaaccc

SEQ ID NO: 7272 - RNA, 21 nt, synthetic construct
  source 1..21: mol_type = other RNA
ctcaagggaaaggtaaacgtg

SEQ ID NO: 7273 - RNA, 21 nt, synthetic construct
  source 1..21: mol_type = other RNA
ctcacaagatcgttctccacg

SEQ ID NO: 7274 - RNA, 21 nt, synthetic construct
  source 1..21: mol_type = other RNA
ctcacatgagcgaaaccactg

SEQ ID NO: 7275 - RNA, 21 nt, synthetic construct
  source 1..21: mol_type = other RNA
ctcacccccctcgccgccttg

SEQ ID NO: 7276 - RNA, 21 nt, synthetic construct
  source 1..21: mol_type = other RNA
ctcacgatcgggccccagggg

SEQ ID NO: 7277 - RNA, 21 nt, synthetic construct
  source 1..21: mol_type = other RNA
ctcacgcagccccagtcccgc

SEQ ID NO: 7278 - RNA, 21 nt, synthetic construct
  source 1..21: mol_type = other RNA
ctcacgggtacgggccattcc

SEQ ID NO: 7279 - RNA, 21 nt, synthetic construct
  source 1..21: mol_type = other RNA
ctcactcagcccgctgcccga

SEQ ID NO: 7280 - RNA, 21 nt, synthetic construct
  source 1..21: mol_type = other RNA
ctcacttcttgggcgtcagtg

SEQ ID NO: 7281 - RNA, 21 nt, synthetic construct
  source 1..21: mol_type = other RNA
ctcagacacgctgtggcacac

SEQ ID NO: 7282 - RNA, 21 nt, synthetic construct
  source 1..21: mol_type = other RNA
ctcagagactcacgcagcccc

SEQ ID NO: 7283 - RNA, 21 nt, synthetic construct
  source 1..21: mol_type = other RNA
ctcagagagcctcggctaggt

SEQ ID NO: 7284 - RNA, 21 nt, synthetic construct
  source 1..21: mol_type = other RNA
ctcagatggctgcttcccaaa

SEQ ID NO: 7285 - RNA, 21 nt, synthetic construct
  source 1..21: mol_type = other RNA
ctcagcccgctgcccgagcgg

SEQ ID NO: 7286 - RNA, 21 nt, synthetic construct
  source 1..21: mol_type = other RNA
ctcatgcgatttacctacttg

SEQ ID NO: 7287 - RNA, 21 nt, synthetic construct
  source 1..21: mol_type = other RNA
ctcatgtgagactcgagccag

SEQ ID NO: 7288 - RNA, 21 nt, synthetic construct
  source 1..21: mol_type = other RNA
ctccaaccagaatacgccatt

SEQ ID NO: 7289 - RNA, 21 nt, synthetic construct
  source 1..21: mol_type = other RNA
ctccacgcccaaggcaagtaa

SEQ ID NO: 7290 - RNA, 21 nt, synthetic construct
  source 1..21: mol_type = other RNA
ctccacgtttacctttccctt

SEQ ID NO: 7291 - RNA, 21 nt, synthetic construct
  source 1..21: mol_type = other RNA
ctccagcgcgcgcttcctgcc

SEQ ID NO: 7292 - RNA, 21 nt, synthetic construct
  source 1..21: mol_type = other RNA
ctccaggctcgaaccctacac

SEQ ID NO: 7293 - RNA, 21 nt, synthetic construct
  source 1..21: mol_type = other RNA
ctcccaacgtaacaaacatta

SEQ ID NO: 7294 - RNA, 21 nt, synthetic construct
  source 1..21: mol_type = other RNA
ctcccaccagagttccgctcc

SEQ ID NO: 7295 - RNA, 21 nt, synthetic construct
  source 1..21: mol_type = other RNA
ctcccaccctccccttccttc

SEQ ID NO: 7296 - RNA, 21 nt, synthetic construct
  source 1..21: mol_type = other RNA
ctccccaagctcttaggagga

SEQ ID NO: 7297 - RNA, 21 nt, synthetic construct
  source 1..21: mol_type = other RNA
ctcccccaacgcctcttcacc

SEQ ID NO: 7298 - RNA, 21 nt, synthetic construct
  source 1..21: mol_type = other RNA
ctcccccacccccacgagtgc

SEQ ID NO: 7299 - RNA, 21 nt, synthetic construct
  source 1..21: mol_type = other RNA
ctcccccgaaggaaggggagg

SEQ ID NO: 7300 - RNA, 21 nt, synthetic construct
  source 1..21: mol_type = other RNA
ctccccctttcatgtttttcc

SEQ ID NO: 7301 - RNA, 21 nt, synthetic construct
  source 1..21: mol_type = other RNA
ctccccgaggccgagcgccgc

SEQ ID NO: 7302 - RNA, 21 nt, synthetic construct
  source 1..21: mol_type = other RNA
ctccccgatcccccactccct

SEQ ID NO: 7303 - RNA, 21 nt, synthetic construct
  source 1..21: mol_type = other RNA
ctccccgcctttggctcgctc

SEQ ID NO: 7304 - RNA, 21 nt, synthetic construct
  source 1..21: mol_type = other RNA
ctccccgcgctcgctctcctt

SEQ ID NO: 7305 - RNA, 21 nt, synthetic construct
  source 1..21: mol_type = other RNA
ctccccgtggcgtgtgccaca

SEQ ID NO: 7306 - RNA, 21 nt, synthetic construct
  source 1..21: mol_type = other RNA
ctcccctacctagccgaggct

SEQ ID NO: 7307 - RNA, 21 nt, synthetic construct
  source 1..21: mol_type = other RNA
ctcccctcccaccagagttcc

SEQ ID NO: 7308 - RNA, 21 nt, synthetic construct
  source 1..21: mol_type = other RNA
ctcccctccgtaatcttcctg

SEQ ID NO: 7309 - RNA, 21 nt, synthetic construct
  source 1..21: mol_type = other RNA
ctcccctggggcccgatcgtg

SEQ ID NO: 7310 - RNA, 21 nt, synthetic construct
  source 1..21: mol_type = other RNA
ctccccttccttcgggggagt

SEQ ID NO: 7311 - RNA, 21 nt, synthetic construct
  source 1..21: mol_type = other RNA
ctcccgacggcgtaactgaca

SEQ ID NO: 7312 - RNA, 21 nt, synthetic construct
  source 1..21: mol_type = other RNA
ctcccgccgcgccattggcct

SEQ ID NO: 7313 - RNA, 21 nt, synthetic construct
  source 1..21: mol_type = other RNA
ctcccgccgtgtgtgaaaaca

SEQ ID NO: 7314 - RNA, 21 nt, synthetic construct
  source 1..21: mol_type = other RNA
ctcccgcctgcatccagccac

SEQ ID NO: 7315 - RNA, 21 nt, synthetic construct
  source 1..21: mol_type = other RNA
ctcccgggaggcggcaggact

SEQ ID NO: 7316 - RNA, 21 nt, synthetic construct
  source 1..21: mol_type = other RNA
ctccctacccccgttctcgcg

SEQ ID NO: 7317 - RNA, 21 nt, synthetic construct
  source 1..21: mol_type = other RNA
ctccctccccctccggttgcc

SEQ ID NO: 7318 - RNA, 21 nt, synthetic construct
  source 1..21: mol_type = other RNA
ctccctcccgcctgcatccag

SEQ ID NO: 7319 - RNA, 21 nt, synthetic construct
  source 1..21: mol_type = other RNA
ctccctctgcgagagcaatgg

SEQ ID NO: 7320 - RNA, 21 nt, synthetic construct
  source 1..21: mol_type = other RNA
ctccctgggaaaatggggtgt

SEQ ID NO: 7321 - RNA, 21 nt, synthetic construct
  source 1..21: mol_type = other RNA
ctcccttctccctccccctcc

SEQ ID NO: 7322 - RNA, 21 nt, synthetic construct
  source 1..21: mol_type = other RNA
ctccgcccaccgccccgcacc

SEQ ID NO: 7323 - RNA, 21 nt, synthetic construct
  source 1..21: mol_type = other RNA
ctccgccccgggttcccaccg

SEQ ID NO: 7324 - RNA, 21 nt, synthetic construct
  source 1..21: mol_type = other RNA
ctccgcctttctgccccccac

SEQ ID NO: 7325 - RNA, 21 nt, synthetic construct
  source 1..21: mol_type = other RNA
ctccgctcgaaatacacaggc

SEQ ID NO: 7326 - RNA, 21 nt, synthetic construct
  source 1..21: mol_type = other RNA
ctccggctcctcagagagcct

SEQ ID NO: 7327 - RNA, 21 nt, synthetic construct
  source 1..21: mol_type = other RNA
ctccggttgccgcagggcggg

SEQ ID NO: 7328 - RNA, 21 nt, synthetic construct
  source 1..21: mol_type = other RNA
ctccgtaatcttcctggacgc

SEQ ID NO: 7329 - RNA, 21 nt, synthetic construct
  source 1..21: mol_type = other RNA
ctccgtccggtttcgagcatt

SEQ ID NO: 7330 - RNA, 21 nt, synthetic construct
  source 1..21: mol_type = other RNA
ctccgtctccccgcgctcgct

SEQ ID NO: 7331 - RNA, 21 nt, synthetic construct
  source 1..21: mol_type = other RNA
ctcctaagagcttggggaggg

SEQ ID NO: 7332 - RNA, 21 nt, synthetic construct
  source 1..21: mol_type = other RNA
ctcctcaagggaaaggtaaac

SEQ ID NO: 7333 - RNA, 21 nt, synthetic construct
  source 1..21: mol_type = other RNA
ctcctcagagagcctcggcta

SEQ ID NO: 7334 - RNA, 21 nt, synthetic construct
  source 1..21: mol_type = other RNA
ctcctcccccacccccacgag

SEQ ID NO: 7335 - RNA, 21 nt, synthetic construct
  source 1..21: mol_type = other RNA
ctcctcccgccgtgtgtgaaa

SEQ ID NO: 7336 - RNA, 21 nt, synthetic construct
  source 1..21: mol_type = other RNA
ctcctccctctgcgagagcaa

SEQ ID NO: 7337 - RNA, 21 nt, synthetic construct
  source 1..21: mol_type = other RNA
ctcctccgtctccccgcgctc

SEQ ID NO: 7338 - RNA, 21 nt, synthetic construct
  source 1..21: mol_type = other RNA
ctcctcttcacattcccgact

SEQ ID NO: 7339 - RNA, 21 nt, synthetic construct
  source 1..21: mol_type = other RNA
ctcctgcggcgggaggggagg

SEQ ID NO: 7340 - RNA, 21 nt, synthetic construct
  source 1..21: mol_type = other RNA
ctcctgtcagttacgccgtcg

SEQ ID NO: 7341 - RNA, 21 nt, synthetic construct
  source 1..21: mol_type = other RNA
ctccttgggtcgtgggcctgg

SEQ ID NO: 7342 - RNA, 21 nt, synthetic construct
  source 1..21: mol_type = other RNA
ctcgaaaccggacggagccat

SEQ ID NO: 7343 - RNA, 21 nt, synthetic construct
  source 1..21: mol_type = other RNA
ctcgaaccctacacattcaac

SEQ ID NO: 7344 - RNA, 21 nt, synthetic construct
  source 1..21: mol_type = other RNA
ctcgagccagtagcaagggcc

SEQ ID NO: 7345 - RNA, 21 nt, synthetic construct
  source 1..21: mol_type = other RNA
ctcgagtcctgccgcctcccg

SEQ ID NO: 7346 - RNA, 21 nt, synthetic construct
  source 1..21: mol_type = other RNA
ctcgagtctcacatgagcgaa

SEQ ID NO: 7347 - RNA, 21 nt, synthetic construct
  source 1..21: mol_type = other RNA
ctcgagttaggcccaacgcgg

SEQ ID NO: 7348 - RNA, 21 nt, synthetic construct
  source 1..21: mol_type = other RNA
ctcgcagagggaggagcgctt

SEQ ID NO: 7349 - RNA, 21 nt, synthetic construct
  source 1..21: mol_type = other RNA
ctcgcccttcaggcggtggga

SEQ ID NO: 7350 - RNA, 21 nt, synthetic construct
  source 1..21: mol_type = other RNA
ctcgccgccaatcagcggaag

SEQ ID NO: 7351 - RNA, 21 nt, synthetic construct
  source 1..21: mol_type = other RNA
ctcgccgccttgcacacaccg

SEQ ID NO: 7352 - RNA, 21 nt, synthetic construct
  source 1..21: mol_type = other RNA
ctcgcggccttgtgacagaca

SEQ ID NO: 7353 - RNA, 21 nt, synthetic construct
  source 1..21: mol_type = other RNA
ctcgcgttgccccctgggtgg

SEQ ID NO: 7354 - RNA, 21 nt, synthetic construct
  source 1..21: mol_type = other RNA
ctcgctccgcctttctgcccc

SEQ ID NO: 7355 - RNA, 21 nt, synthetic construct
  source 1..21: mol_type = other RNA
ctcgctctccttgggtcgtgg

SEQ ID NO: 7356 - RNA, 21 nt, synthetic construct
  source 1..21: mol_type = other RNA
ctcggcctcggggaggaccgt

SEQ ID NO: 7357 - RNA, 21 nt, synthetic construct
  source 1..21: mol_type = other RNA
ctcggctaggtaggggagcgg

SEQ ID NO: 7358 - RNA, 21 nt, synthetic construct
  source 1..21: mol_type = other RNA
ctcgggcagcgggctgagtga

SEQ ID NO: 7359 - RNA, 21 nt, synthetic construct
  source 1..21: mol_type = other RNA
ctcggggaggaccgtaccaac

SEQ ID NO: 7360 - RNA, 21 nt, synthetic construct
  source 1..21: mol_type = other RNA
ctcgtgggggtgggggaggag

SEQ ID NO: 7361 - RNA, 21 nt, synthetic construct
  source 1..21: mol_type = other RNA
ctcgttgaatgtgtagggttc

SEQ ID NO: 7362 - RNA, 21 nt, synthetic construct
  source 1..21: mol_type = other RNA
ctcgttttctggcttcccacc

SEQ ID NO: 7363 - RNA, 21 nt, synthetic construct
  source 1..21: mol_type = other RNA
ctctaatctaggcgacccaac

SEQ ID NO: 7364 - RNA, 21 nt, synthetic construct
  source 1..21: mol_type = other RNA
ctctacaccccacctacctac

SEQ ID NO: 7365 - RNA, 21 nt, synthetic construct
  source 1..21: mol_type = other RNA
ctctaggcggccccggcggct

SEQ ID NO: 7366 - RNA, 21 nt, synthetic construct
  source 1..21: mol_type = other RNA
ctctatagaatcaattagcat

SEQ ID NO: 7367 - RNA, 21 nt, synthetic construct
  source 1..21: mol_type = other RNA
ctctcatgcgatttacctact

SEQ ID NO: 7368 - RNA, 21 nt, synthetic construct
  source 1..21: mol_type = other RNA
ctctccccgatcccccactcc

SEQ ID NO: 7369 - RNA, 21 nt, synthetic construct
  source 1..21: mol_type = other RNA
ctctccctgggaaaatggggt

SEQ ID NO: 7370 - RNA, 21 nt, synthetic construct
  source 1..21: mol_type = other RNA
ctctccgcccaccgccccgca

SEQ ID NO: 7371 - RNA, 21 nt, synthetic construct
  source 1..21: mol_type = other RNA
ctctcctcaagggaaaggtaa

SEQ ID NO: 7372 - RNA, 21 nt, synthetic construct
  source 1..21: mol_type = other RNA
ctctccttgggtcgtgggcct

SEQ ID NO: 7373 - RNA, 21 nt, synthetic construct
  source 1..21: mol_type = other RNA
ctctcgcagagggaggagcgc

SEQ ID NO: 7374 - RNA, 21 nt, synthetic construct
  source 1..21: mol_type = other RNA
ctctcgcgttgccccctgggt

SEQ ID NO: 7375 - RNA, 21 nt, synthetic construct
  source 1..21: mol_type = other RNA
ctctcgttttctggcttccca

SEQ ID NO: 7376 - RNA, 21 nt, synthetic construct
  source 1..21: mol_type = other RNA
ctctctccctgggaaaatggg

SEQ ID NO: 7377 - RNA, 21 nt, synthetic construct
  source 1..21: mol_type = other RNA
ctctctgaggagccggagcgc

SEQ ID NO: 7378 - RNA, 21 nt, synthetic construct
  source 1..21: mol_type = other RNA
ctctgaggagccggagcgccg

SEQ ID NO: 7379 - RNA, 21 nt, synthetic construct
  source 1..21: mol_type = other RNA
ctctgatcgctctgggggccg

SEQ ID NO: 7380 - RNA, 21 nt, synthetic construct
  source 1..21: mol_type = other RNA
ctctgcgagagcaatggctcc

SEQ ID NO: 7381 - RNA, 21 nt, synthetic construct
  source 1..21: mol_type = other RNA
ctctgcgtgtaagtcgggaat

SEQ ID NO: 7382 - RNA, 21 nt, synthetic construct
  source 1..21: mol_type = other RNA
ctctggcgcgggcgtcctccc

SEQ ID NO: 7383 - RNA, 21 nt, synthetic construct
  source 1..21: mol_type = other RNA
ctctggctccccgtggcgtgt

SEQ ID NO: 7384 - RNA, 21 nt, synthetic construct
  source 1..21: mol_type = other RNA
ctctgggggccgcgatctccc

SEQ ID NO: 7385 - RNA, 21 nt, synthetic construct
  source 1..21: mol_type = other RNA
ctctggtgggaggggaggtgc

SEQ ID NO: 7386 - RNA, 21 nt, synthetic construct
  source 1..21: mol_type = other RNA
ctcttaggaggatgctgccac

SEQ ID NO: 7387 - RNA, 21 nt, synthetic construct
  source 1..21: mol_type = other RNA
ctcttcacattcccgacttac

SEQ ID NO: 7388 - RNA, 21 nt, synthetic construct
  source 1..21: mol_type = other RNA
ctcttcaccccctttcctggg

SEQ ID NO: 7389 - RNA, 21 nt, synthetic construct
  source 1..21: mol_type = other RNA
ctcttctctaggcggccccgg

SEQ ID NO: 7390 - RNA, 21 nt, synthetic construct
  source 1..21: mol_type = other RNA
ctcttgctgccctccgctcga

SEQ ID NO: 7391 - RNA, 21 nt, synthetic construct
  source 1..21: mol_type = other RNA
ctcttgtcgccgattggccgt

SEQ ID NO: 7392 - RNA, 21 nt, synthetic construct
  source 1..21: mol_type = other RNA
ctctttccctctgcgtgtaag

SEQ ID NO: 7393 - RNA, 21 nt, synthetic construct
  source 1..21: mol_type = other RNA
ctctttcctacactcctcttc

SEQ ID NO: 7394 - RNA, 21 nt, synthetic construct
  source 1..21: mol_type = other RNA
ctcttttctgtcggaccctta

SEQ ID NO: 7395 - RNA, 21 nt, synthetic construct
  source 1..21: mol_type = other RNA
ctgaagggcgagacaagcccg

SEQ ID NO: 7396 - RNA, 21 nt, synthetic construct
  source 1..21: mol_type = other RNA
ctgacaggagctttactccaa

SEQ ID NO: 7397 - RNA, 21 nt, synthetic construct
  source 1..21: mol_type = other RNA
ctgacccaggaaaaacatgaa

SEQ ID NO: 7398 - RNA, 21 nt, synthetic construct
  source 1..21: mol_type = other RNA
ctgaccctcccctcccgccgc

SEQ ID NO: 7399 - RNA, 21 nt, synthetic construct
  source 1..21: mol_type = other RNA
ctgaccgcacggggattccca

SEQ ID NO: 7400 - RNA, 21 nt, synthetic construct
  source 1..21: mol_type = other RNA
ctgacgcccaagaagtgagac

SEQ ID NO: 7401 - RNA, 21 nt, synthetic construct
  source 1..21: mol_type = other RNA
ctgagatagcctcgttgaatg

SEQ ID NO: 7402 - RNA, 21 nt, synthetic construct
  source 1..21: mol_type = other RNA
ctgaggagccggagcgccgaa

SEQ ID NO: 7403 - RNA, 21 nt, synthetic construct
  source 1..21: mol_type = other RNA
ctgaggtgggaagccagaaaa

SEQ ID NO: 7404 - RNA, 21 nt, synthetic construct
  source 1..21: mol_type = other RNA
ctgatcgctctgggggccgcg

SEQ ID NO: 7405 - RNA, 21 nt, synthetic construct
  source 1..21: mol_type = other RNA
ctgattggcggcgagtgggcc

SEQ ID NO: 7406 - RNA, 21 nt, synthetic construct
  source 1..21: mol_type = other RNA
ctgattggctgtcgaagctgt

SEQ ID NO: 7407 - RNA, 21 nt, synthetic construct
  source 1..21: mol_type = other RNA
ctgcagcatccatatccaaga

SEQ ID NO: 7408 - RNA, 21 nt, synthetic construct
  source 1..21: mol_type = other RNA
ctgcatccagccacccctttc

SEQ ID NO: 7409 - RNA, 21 nt, synthetic construct
  source 1..21: mol_type = other RNA
ctgccacgttgcgcaggggcg

SEQ ID NO: 7410 - RNA, 21 nt, synthetic construct
  source 1..21: mol_type = other RNA
ctgccacttctcacccccctc

SEQ ID NO: 7411 - RNA, 21 nt, synthetic construct
  source 1..21: mol_type = other RNA
ctgccccccacccccacctca

SEQ ID NO: 7412 - RNA, 21 nt, synthetic construct
  source 1..21: mol_type = other RNA
ctgcccgagcggaaacgccac

SEQ ID NO: 7413 - RNA, 21 nt, synthetic construct
  source 1..21: mol_type = other RNA
ctgccctccgctcgaaataca

SEQ ID NO: 7414 - RNA, 21 nt, synthetic construct
  source 1..21: mol_type = other RNA
ctgccggccgagacttctgga

SEQ ID NO: 7415 - RNA, 21 nt, synthetic construct
  source 1..21: mol_type = other RNA
ctgcctactccacgtttacct

SEQ ID NO: 7416 - RNA, 21 nt, synthetic construct
  source 1..21: mol_type = other RNA
ctgcctttgaagatattctca

SEQ ID NO: 7417 - RNA, 21 nt, synthetic construct
  source 1..21: mol_type = other RNA
ctgcgagagcaatggctccgt

SEQ ID NO: 7418 - RNA, 21 nt, synthetic construct
  source 1..21: mol_type = other RNA
ctgcgcaacgtggcaggaagc

SEQ ID NO: 7419 - RNA, 21 nt, synthetic construct
  source 1..21: mol_type = other RNA
ctgcgctcagagactcacgca

SEQ ID NO: 7420 - RNA, 21 nt, synthetic construct
  source 1..21: mol_type = other RNA
ctgcggcaaccggagggggag

SEQ ID NO: 7421 - RNA, 21 nt, synthetic construct
  source 1..21: mol_type = other RNA
ctgcggcgctcggcctcgggg

SEQ ID NO: 7422 - RNA, 21 nt, synthetic construct
  source 1..21: mol_type = other RNA
ctgcggcgggaggggagggtc

SEQ ID NO: 7423 - RNA, 21 nt, synthetic construct
  source 1..21: mol_type = other RNA
ctgcgtactcccgacggcgta

SEQ ID NO: 7424 - RNA, 21 nt, synthetic construct
  source 1..21: mol_type = other RNA
ctgcgtgagtctctgagcgca

SEQ ID NO: 7425 - RNA, 21 nt, synthetic construct
  source 1..21: mol_type = other RNA
ctgcgtgtaagtcgggaatgt

SEQ ID NO: 7426 - RNA, 21 nt, synthetic construct
  source 1..21: mol_type = other RNA
ctgctacaggcactcgtgggg

SEQ ID NO: 7427 - RNA, 21 nt, synthetic construct
  source 1..21: mol_type = other RNA
ctgcttcccaaaggcattacc

SEQ ID NO: 7428 - RNA, 21 nt, synthetic construct
  source 1..21: mol_type = other RNA
ctgcttgtcttcgacacctga

SEQ ID NO: 7429 - RNA, 21 nt, synthetic construct
  source 1..21: mol_type = other RNA
ctggacgccttccctctcgtt

SEQ ID NO: 7430 - RNA, 21 nt, synthetic construct
  source 1..21: mol_type = other RNA
ctggagttgagccagattgtg

SEQ ID NO: 7431 - RNA, 21 nt, synthetic construct
  source 1..21: mol_type = other RNA
ctggatgcaggcgggagggag

SEQ ID NO: 7432 - RNA, 21 nt, synthetic construct
  source 1..21: mol_type = other RNA
ctggccccgcgcccctgcgca

SEQ ID NO: 7433 - RNA, 21 nt, synthetic construct
  source 1..21: mol_type = other RNA
ctggccctccccaagctctta

SEQ ID NO: 7434 - RNA, 21 nt, synthetic construct
  source 1..21: mol_type = other RNA
ctggccgggaatggcccgtac

SEQ ID NO: 7435 - RNA, 21 nt, synthetic construct
  source 1..21: mol_type = other RNA
ctggcgccggcgctgggaatc

SEQ ID NO: 7436 - RNA, 21 nt, synthetic construct
  source 1..21: mol_type = other RNA
ctggcgcgggcgtcctcccac

SEQ ID NO: 7437 - RNA, 21 nt, synthetic construct
  source 1..21: mol_type = other RNA
ctggcgggactggggctgcgt

SEQ ID NO: 7438 - RNA, 21 nt, synthetic construct
  source 1..21: mol_type = other RNA
ctggctcaactccaggctcga

SEQ ID NO: 7439 - RNA, 21 nt, synthetic construct
  source 1..21: mol_type = other RNA
ctggctccccgtggcgtgtgc

SEQ ID NO: 7440 - RNA, 21 nt, synthetic construct
  source 1..21: mol_type = other RNA
ctggctcgagtctcacatgag

SEQ ID NO: 7441 - RNA, 21 nt, synthetic construct
  source 1..21: mol_type = other RNA
ctggcttcccacctcagatgg

SEQ ID NO: 7442 - RNA, 21 nt, synthetic construct
  source 1..21: mol_type = other RNA
ctgggaaaatggggtgttgca

SEQ ID NO: 7443 - RNA, 21 nt, synthetic construct
  source 1..21: mol_type = other RNA
ctgggaactgcctactccacg

SEQ ID NO: 7444 - RNA, 21 nt, synthetic construct
  source 1..21: mol_type = other RNA
ctgggaatccccgtgcggtca

SEQ ID NO: 7445 - RNA, 21 nt, synthetic construct
  source 1..21: mol_type = other RNA
ctgggacaaggtaagggtccg

SEQ ID NO: 7446 - RNA, 21 nt, synthetic construct
  source 1..21: mol_type = other RNA
ctggggcccgatcgtgaggtt

SEQ ID NO: 7447 - RNA, 21 nt, synthetic construct
  source 1..21: mol_type = other RNA
ctggggctgcgtgagtctctg

SEQ ID NO: 7448 - RNA, 21 nt, synthetic construct
  source 1..21: mol_type = other RNA
ctgggggccgcgatctcccct

SEQ ID NO: 7449 - RNA, 21 nt, synthetic construct
  source 1..21: mol_type = other RNA
ctggggggatgggtggctagg

SEQ ID NO: 7450 - RNA, 21 nt, synthetic construct
  source 1..21: mol_type = other RNA
ctgggtcaggacgcttcccct

SEQ ID NO: 7451 - RNA, 21 nt, synthetic construct
  source 1..21: mol_type = other RNA
ctgggtggggcgggtaggtag

SEQ ID NO: 7452 - RNA, 21 nt, synthetic construct
  source 1..21: mol_type = other RNA
ctggtggcttgcgggggttgc

SEQ ID NO: 7453 - RNA, 21 nt, synthetic construct
  source 1..21: mol_type = other RNA
ctggtgggaggggaggtgcgg

SEQ ID NO: 7454 - RNA, 21 nt, synthetic construct
  source 1..21: mol_type = other RNA
ctggttcaagtaggtaaatcg

SEQ ID NO: 7455 - RNA, 21 nt, synthetic construct
  source 1..21: mol_type = other RNA
ctggttggagtaaagctcctg

SEQ ID NO: 7456 - RNA, 21 nt, synthetic construct
  source 1..21: mol_type = other RNA
ctgtagcaggtcgggcttgtc

SEQ ID NO: 7457 - RNA, 21 nt, synthetic construct
  source 1..21: mol_type = other RNA
ctgtcacaaggccgcgagaac

SEQ ID NO: 7458 - RNA, 21 nt, synthetic construct
  source 1..21: mol_type = other RNA
ctgtcagttacgccgtcggga

SEQ ID NO: 7459 - RNA, 21 nt, synthetic construct
  source 1..21: mol_type = other RNA
ctgtcgaagctgtgggaccgg

SEQ ID NO: 7460 - RNA, 21 nt, synthetic construct
  source 1..21: mol_type = other RNA
ctgtcggacccttaccttgtc

SEQ ID NO: 7461 - RNA, 21 nt, synthetic construct
  source 1..21: mol_type = other RNA
ctgtgcttcggcgctccggct

SEQ ID NO: 7462 - RNA, 21 nt, synthetic construct
  source 1..21: mol_type = other RNA
ctgtggcacacgccacgggga

SEQ ID NO: 7463 - RNA, 21 nt, synthetic construct
  source 1..21: mol_type = other RNA
ctgtgggaccgggcccttgct

SEQ ID NO: 7464 - RNA, 21 nt, synthetic construct
  source 1..21: mol_type = other RNA
ctgtgtatttcgagcggaggg

SEQ ID NO: 7465 - RNA, 21 nt, synthetic construct
  source 1..21: mol_type = other RNA
ctgtgttggcggactggcggg

SEQ ID NO: 7466 - RNA, 21 nt, synthetic construct
  source 1..21: mol_type = other RNA
ctgttgggaaagccccttcta

SEQ ID NO: 7467 - RNA, 21 nt, synthetic construct
  source 1..21: mol_type = other RNA
cttacacgcagagggaaagag

SEQ ID NO: 7468 - RNA, 21 nt, synthetic construct
  source 1..21: mol_type = other RNA
cttaccttgtcccaggcgctg

SEQ ID NO: 7469 - RNA, 21 nt, synthetic construct
  source 1..21: mol_type = other RNA
cttagcgactctcgcgttgcc

SEQ ID NO: 7470 - RNA, 21 nt, synthetic construct
  source 1..21: mol_type = other RNA
cttaggaggatgctgccactt

SEQ ID NO: 7471 - RNA, 21 nt, synthetic construct
  source 1..21: mol_type = other RNA
cttcaaaggcagaaaaatatt

SEQ ID NO: 7472 - RNA, 21 nt, synthetic construct
  source 1..21: mol_type = other RNA
cttcacattcccgacttacac

SEQ ID NO: 7473 - RNA, 21 nt, synthetic construct
  source 1..21: mol_type = other RNA
cttcaccccctttcctgggaa

SEQ ID NO: 7474 - RNA, 21 nt, synthetic construct
  source 1..21: mol_type = other RNA
cttcaggcggtgggaacccgg

SEQ ID NO: 7475 - RNA, 21 nt, synthetic construct
  source 1..21: mol_type = other RNA
cttcccaaaggcattaccttc

SEQ ID NO: 7476 - RNA, 21 nt, synthetic construct
  source 1..21: mol_type = other RNA
cttcccacctcagatggctgc

SEQ ID NO: 7477 - RNA, 21 nt, synthetic construct
  source 1..21: mol_type = other RNA
cttcccacgggaaaggcaacc

SEQ ID NO: 7478 - RNA, 21 nt, synthetic construct
  source 1..21: mol_type = other RNA
cttcccctcccccaacgcctc

SEQ ID NO: 7479 - RNA, 21 nt, synthetic construct
  source 1..21: mol_type = other RNA
cttccctcccctggggcccga

SEQ ID NO: 7480 - RNA, 21 nt, synthetic construct
  source 1..21: mol_type = other RNA
cttccctctcgttttctggct

SEQ ID NO: 7481 - RNA, 21 nt, synthetic construct
  source 1..21: mol_type = other RNA
cttccgctgattggcggcgag

SEQ ID NO: 7482 - RNA, 21 nt, synthetic construct
  source 1..21: mol_type = other RNA
cttccggctagcctcttgtcg

SEQ ID NO: 7483 - RNA, 21 nt, synthetic construct
  source 1..21: mol_type = other RNA
cttcctgccacgttgcgcagg

SEQ ID NO: 7484 - RNA, 21 nt, synthetic construct
  source 1..21: mol_type = other RNA
cttcctggacgccttccctct

SEQ ID NO: 7485 - RNA, 21 nt, synthetic construct
  source 1..21: mol_type = other RNA
cttccttcgggggagtcggtt

SEQ ID NO: 7486 - RNA, 21 nt, synthetic construct
  source 1..21: mol_type = other RNA
cttcgacacctgattggctgt

SEQ ID NO: 7487 - RNA, 21 nt, synthetic construct
  source 1..21: mol_type = other RNA
cttcgacagccaatcaggtgt

SEQ ID NO: 7488 - RNA, 21 nt, synthetic construct
  source 1..21: mol_type = other RNA
cttcgccacccccaccacacg

SEQ ID NO: 7489 - RNA, 21 nt, synthetic construct
  source 1..21: mol_type = other RNA
cttcggcgctccggctcctca

SEQ ID NO: 7490 - RNA, 21 nt, synthetic construct
  source 1..21: mol_type = other RNA
cttcgggggagtcggtttacc

SEQ ID NO: 7491 - RNA, 21 nt, synthetic construct
  source 1..21: mol_type = other RNA
cttctatgctaattgattcta

SEQ ID NO: 7492 - RNA, 21 nt, synthetic construct
  source 1..21: mol_type = other RNA
cttctcacccccctcgccgcc

SEQ ID NO: 7493 - RNA, 21 nt, synthetic construct
  source 1..21: mol_type = other RNA
cttctccctccccctccggtt

SEQ ID NO: 7494 - RNA, 21 nt, synthetic construct
  source 1..21: mol_type = other RNA
cttctctaggcggccccggcg

SEQ ID NO: 7495 - RNA, 21 nt, synthetic construct
  source 1..21: mol_type = other RNA
cttctggatggcggcggccgc

SEQ ID NO: 7496 - RNA, 21 nt, synthetic construct
  source 1..21: mol_type = other RNA
cttcttgggcgtcagtggtct

SEQ ID NO: 7497 - RNA, 21 nt, synthetic construct
  source 1..21: mol_type = other RNA
cttgaaccagggctctttcct

SEQ ID NO: 7498 - RNA, 21 nt, synthetic construct
  source 1..21: mol_type = other RNA
cttgaggagaggcctcttgct

SEQ ID NO: 7499 - RNA, 21 nt, synthetic construct
  source 1..21: mol_type = other RNA
cttgcacacaccgttgcaaca

SEQ ID NO: 7500 - RNA, 21 nt, synthetic construct
  source 1..21: mol_type = other RNA
cttgccttgggcgtggagaac

SEQ ID NO: 7501 - RNA, 21 nt, synthetic construct
  source 1..21: mol_type = other RNA
cttgcgggggttgcctttccc

SEQ ID NO: 7502 - RNA, 21 nt, synthetic construct
  source 1..21: mol_type = other RNA
cttgctactggctcgagtctc

SEQ ID NO: 7503 - RNA, 21 nt, synthetic construct
  source 1..21: mol_type = other RNA
cttgctgccctccgctcgaaa

SEQ ID NO: 7504 - RNA, 21 nt, synthetic construct
  source 1..21: mol_type = other RNA
cttgcttgtctcacttcttgg

SEQ ID NO: 7505 - RNA, 21 nt, synthetic construct
  source 1..21: mol_type = other RNA
cttgggcgtcagtggtctttc

SEQ ID NO: 7506 - RNA, 21 nt, synthetic construct
  source 1..21: mol_type = other RNA
cttgggcgtggagaacgatct

SEQ ID NO: 7507 - RNA, 21 nt, synthetic construct
  source 1..21: mol_type = other RNA
cttggggagggccaggcccac

SEQ ID NO: 7508 - RNA, 21 nt, synthetic construct
  source 1..21: mol_type = other RNA
cttgggtcgtgggcctggccc

SEQ ID NO: 7509 - RNA, 21 nt, synthetic construct
  source 1..21: mol_type = other RNA
cttgtcccaggcgctgccggg

SEQ ID NO: 7510 - RNA, 21 nt, synthetic construct
  source 1..21: mol_type = other RNA
cttgtcgccgattggccgttt

SEQ ID NO: 7511 - RNA, 21 nt, synthetic construct
  source 1..21: mol_type = other RNA
cttgtctcacttcttgggcgt

SEQ ID NO: 7512 - RNA, 21 nt, synthetic construct
  source 1..21: mol_type = other RNA
cttgtctcgcccttcaggcgg

SEQ ID NO: 7513 - RNA, 21 nt, synthetic construct
  source 1..21: mol_type = other RNA
cttgtcttcgacacctgattg

SEQ ID NO: 7514 - RNA, 21 nt, synthetic construct
  source 1..21: mol_type = other RNA
cttgtgacagacaactctgat

SEQ ID NO: 7515 - RNA, 21 nt, synthetic construct
  source 1..21: mol_type = other RNA
cttgtgagaatatcttcaaag

SEQ ID NO: 7516 - RNA, 21 nt, synthetic construct
  source 1..21: mol_type = other RNA
ctttactccaaccagaatacg

SEQ ID NO: 7517 - RNA, 21 nt, synthetic construct
  source 1..21: mol_type = other RNA
ctttatgaattctctttccct

SEQ ID NO: 7518 - RNA, 21 nt, synthetic construct
  source 1..21: mol_type = other RNA
ctttcatgtttttcctgggtc

SEQ ID NO: 7519 - RNA, 21 nt, synthetic construct
  source 1..21: mol_type = other RNA
ctttcccaacagtttaacttt

SEQ ID NO: 7520 - RNA, 21 nt, synthetic construct
  source 1..21: mol_type = other RNA
ctttcccgtgggaagtcggga

SEQ ID NO: 7521 - RNA, 21 nt, synthetic construct
  source 1..21: mol_type = other RNA
ctttccctcccaacgtaacaa

SEQ ID NO: 7522 - RNA, 21 nt, synthetic construct
  source 1..21: mol_type = other RNA
ctttccctctcatgcgattta

SEQ ID NO: 7523 - RNA, 21 nt, synthetic construct
  source 1..21: mol_type = other RNA
ctttccctctgcgtgtaagtc

SEQ ID NO: 7524 - RNA, 21 nt, synthetic construct
  source 1..21: mol_type = other RNA
ctttcccttgaggagaggcct

SEQ ID NO: 7525 - RNA, 21 nt, synthetic construct
  source 1..21: mol_type = other RNA
ctttcctacactcctcttcac

SEQ ID NO: 7526 - RNA, 21 nt, synthetic construct
  source 1..21: mol_type = other RNA
ctttcctgggaactgcctact

SEQ ID NO: 7527 - RNA, 21 nt, synthetic construct
  source 1..21: mol_type = other RNA
ctttctcttggatatggatgc

SEQ ID NO: 7528 - RNA, 21 nt, synthetic construct
  source 1..21: mol_type = other RNA
ctttctgccccccacccccac

SEQ ID NO: 7529 - RNA, 21 nt, synthetic construct
  source 1..21: mol_type = other RNA
ctttgaagatattctcacaag

SEQ ID NO: 7530 - RNA, 21 nt, synthetic construct
  source 1..21: mol_type = other RNA
ctttggctcgctccgcctttc

SEQ ID NO: 7531 - RNA, 21 nt, synthetic construct
  source 1..21: mol_type = other RNA
ctttgggaagcagccatctga

SEQ ID NO: 7532 - RNA, 21 nt, synthetic construct
  source 1..21: mol_type = other RNA
cttttctgtcggacccttacc

SEQ ID NO: 7533 - RNA, 21 nt, synthetic construct
  source 1..21: mol_type = other RNA
gaaaaacatgaaagggggagt

SEQ ID NO: 7534 - RNA, 21 nt, synthetic construct
  source 1..21: mol_type = other RNA
gaaaacacaaatggcgtattc

SEQ ID NO: 7535 - RNA, 21 nt, synthetic construct
  source 1..21: mol_type = other RNA
gaaaacgagagggaaggcgtc

SEQ ID NO: 7536 - RNA, 21 nt, synthetic construct
  source 1..21: mol_type = other RNA
gaaaagagaccgaacctcacg

SEQ ID NO: 7537 - RNA, 21 nt, synthetic construct
  source 1..21: mol_type = other RNA
gaaaatgctcgaaaccggacg

SEQ ID NO: 7538 - RNA, 21 nt, synthetic construct
  source 1..21: mol_type = other RNA
gaaaatggggtgttgcaacgg

SEQ ID NO: 7539 - RNA, 21 nt, synthetic construct
  source 1..21: mol_type = other RNA
gaaaccactgcgcggggcgcg

SEQ ID NO: 7540 - RNA, 21 nt, synthetic construct
  source 1..21: mol_type = other RNA
gaaaccggacggagccattgc

SEQ ID NO: 7541 - RNA, 21 nt, synthetic construct
  source 1..21: mol_type = other RNA
gaaacgccactgaccgcacgg

SEQ ID NO: 7542 - RNA, 21 nt, synthetic construct
  source 1..21: mol_type = other RNA
gaaacgccgtggcgccgcgtt

SEQ ID NO: 7543 - RNA, 21 nt, synthetic construct
  source 1..21: mol_type = other RNA
gaaacggccaatcggcgacaa

SEQ ID NO: 7544 - RNA, 21 nt, synthetic construct
  source 1..21: mol_type = other RNA
gaaagaccactgacgcccaag

SEQ ID NO: 7545 - RNA, 21 nt, synthetic construct
  source 1..21: mol_type = other RNA
gaaagagccctggttcaagta

SEQ ID NO: 7546 - RNA, 21 nt, synthetic construct
  source 1..21: mol_type = other RNA
gaaagaggggggccggcacta

SEQ ID NO: 7547 - RNA, 21 nt, synthetic construct
  source 1..21: mol_type = other RNA
gaaagccccttctatgctaat

SEQ ID NO: 7548 - RNA, 21 nt, synthetic construct
  source 1..21: mol_type = other RNA
gaaaggcaacccccgcaagcc

SEQ ID NO: 7549 - RNA, 21 nt, synthetic construct
  source 1..21: mol_type = other RNA
gaaaggcggagcgagccaaag

SEQ ID NO: 7550 - RNA, 21 nt, synthetic construct
  source 1..21: mol_type = other RNA
gaaagggggagttgggtcgcc

SEQ ID NO: 7551 - RNA, 21 nt, synthetic construct
  source 1..21: mol_type = other RNA
gaaagggggtgaagaggcgtt

SEQ ID NO: 7552 - RNA, 21 nt, synthetic construct
  source 1..21: mol_type = other RNA
gaaaggggtggctggatgcag

SEQ ID NO: 7553 - RNA, 21 nt, synthetic construct
  source 1..21: mol_type = other RNA
gaaaggtaaacgtggagtagg

SEQ ID NO: 7554 - RNA, 21 nt, synthetic construct
  source 1..21: mol_type = other RNA
gaaagttaaactgttgggaaa

SEQ ID NO: 7555 - RNA, 21 nt, synthetic construct
  source 1..21: mol_type = other RNA
gaaatcggctctggcgcgggc

SEQ ID NO: 7556 - RNA, 21 nt, synthetic construct
  source 1..21: mol_type = other RNA
gaacataatgtttgttacgtt

SEQ ID NO: 7557 - RNA, 21 nt, synthetic construct
  source 1..21: mol_type = other RNA
gaaccagggctctttcctaca

SEQ ID NO: 7558 - RNA, 21 nt, synthetic construct
  source 1..21: mol_type = other RNA
gaaccctacacattcaacgag

SEQ ID NO: 7559 - RNA, 21 nt, synthetic construct
  source 1..21: mol_type = other RNA
gaacctcacgatcgggcccca

SEQ ID NO: 7560 - RNA, 21 nt, synthetic construct
  source 1..21: mol_type = other RNA
gaacgatcttgtgagaatatc

SEQ ID NO: 7561 - RNA, 21 nt, synthetic construct
  source 1..21: mol_type = other RNA
gaacgggggtagggagtgggg

SEQ ID NO: 7562 - RNA, 21 nt, synthetic construct
  source 1..21: mol_type = other RNA
gaacgtgtggtgggggtggcg

SEQ ID NO: 7563 - RNA, 21 nt, synthetic construct
  source 1..21: mol_type = other RNA
gaactctggtgggaggggagg

SEQ ID NO: 7564 - RNA, 21 nt, synthetic construct
  source 1..21: mol_type = other RNA
gaactgcctactccacgttta

SEQ ID NO: 7565 - RNA, 21 nt, synthetic construct
  source 1..21: mol_type = other RNA
gaagacaagcaggcggcgggt

SEQ ID NO: 7566 - RNA, 21 nt, synthetic construct
  source 1..21: mol_type = other RNA
gaagaggagtgtaggaaagag

SEQ ID NO: 7567 - RNA, 21 nt, synthetic construct
  source 1..21: mol_type = other RNA
gaagaggcgttgggggagggg

SEQ ID NO: 7568 - RNA, 21 nt, synthetic construct
  source 1..21: mol_type = other RNA
gaagaggctgtgcttcggcgc

SEQ ID NO: 7569 - RNA, 21 nt, synthetic construct
  source 1..21: mol_type = other RNA
gaagatattctcacaagatcg

SEQ ID NO: 7570 - RNA, 21 nt, synthetic construct
  source 1..21: mol_type = other RNA
gaagattacggaggggagatc

SEQ ID NO: 7571 - RNA, 21 nt, synthetic construct
  source 1..21: mol_type = other RNA
gaagcacagcctcttctctag

SEQ ID NO: 7572 - RNA, 21 nt, synthetic construct
  source 1..21: mol_type = other RNA
gaagcagccatctgaggtggg

SEQ ID NO: 7573 - RNA, 21 nt, synthetic construct
  source 1..21: mol_type = other RNA
gaagccagaaaacgagaggga

SEQ ID NO: 7574 - RNA, 21 nt, synthetic construct
  source 1..21: mol_type = other RNA
gaagccgccggggccgcctag

SEQ ID NO: 7575 - RNA, 21 nt, synthetic construct
  source 1..21: mol_type = other RNA
gaagcgctcctccctctgcga

SEQ ID NO: 7576 - RNA, 21 nt, synthetic construct
  source 1..21: mol_type = other RNA
gaagcgtcctgacccaggaaa

SEQ ID NO: 7577 - RNA, 21 nt, synthetic construct
  source 1..21: mol_type = other RNA
gaagctgtgggaccgggccct

SEQ ID NO: 7578 - RNA, 21 nt, synthetic construct
  source 1..21: mol_type = other RNA
gaaggaaggggagggtgggag

SEQ ID NO: 7579 - RNA, 21 nt, synthetic construct
  source 1..21: mol_type = other RNA
gaaggcgtccaggaagattac

SEQ ID NO: 7580 - RNA, 21 nt, synthetic construct
  source 1..21: mol_type = other RNA
gaagggagcggaaaatgctcg

SEQ ID NO: 7581 - RNA, 21 nt, synthetic construct
  source 1..21: mol_type = other RNA
gaagggcgagacaagcccgac

SEQ ID NO: 7582 - RNA, 21 nt, synthetic construct
  source 1..21: mol_type = other RNA
gaaggggagggtgggaggacg

SEQ ID NO: 7583 - RNA, 21 nt, synthetic construct
  source 1..21: mol_type = other RNA
gaaggggctttcccaacagtt

SEQ ID NO: 7584 - RNA, 21 nt, synthetic construct
  source 1..21: mol_type = other RNA
gaagggtcacctcctccgtct

SEQ ID NO: 7585 - RNA, 21 nt, synthetic construct
  source 1..21: mol_type = other RNA
gaaggtaatgcctttgggaag

SEQ ID NO: 7586 - RNA, 21 nt, synthetic construct
  source 1..21: mol_type = other RNA
gaagtcgggaacataatgttt

SEQ ID NO: 7587 - RNA, 21 nt, synthetic construct
  source 1..21: mol_type = other RNA
gaagtgagacaagcaaggact

SEQ ID NO: 7588 - RNA, 21 nt, synthetic construct
  source 1..21: mol_type = other RNA
gaagtggcagcatcctcctaa

SEQ ID NO: 7589 - RNA, 21 nt, synthetic construct
  source 1..21: mol_type = other RNA
gaatacgccatttgtgttttc

SEQ ID NO: 7590 - RNA, 21 nt, synthetic construct
  source 1..21: mol_type = other RNA
gaatatcttcaaaggcagaaa

SEQ ID NO: 7591 - RNA, 21 nt, synthetic construct
  source 1..21: mol_type = other RNA
gaatatttttctgcctttgaa

SEQ ID NO: 7592 - RNA, 21 nt, synthetic construct
  source 1..21: mol_type = other RNA
gaatcaattagcatagaaggg

SEQ ID NO: 7593 - RNA, 21 nt, synthetic construct
  source 1..21: mol_type = other RNA
gaatccccgtgcggtcagtgg

SEQ ID NO: 7594 - RNA, 21 nt, synthetic construct
  source 1..21: mol_type = other RNA
gaatggcccgtacccgtgagg

SEQ ID NO: 7595 - RNA, 21 nt, synthetic construct
  source 1..21: mol_type = other RNA
gaatgtgaagaggagtgtagg

SEQ ID NO: 7596 - RNA, 21 nt, synthetic construct
  source 1..21: mol_type = other RNA
gaatgtgtagggttcgagcct

SEQ ID NO: 7597 - RNA, 21 nt, synthetic construct
  source 1..21: mol_type = other RNA
gaattcataaagggaatattt

SEQ ID NO: 7598 - RNA, 21 nt, synthetic construct
  source 1..21: mol_type = other RNA
gaattctctttccctctgcgt

SEQ ID NO: 7599 - RNA, 21 nt, synthetic construct
  source 1..21: mol_type = other RNA
gacaactctgatcgctctggg

SEQ ID NO: 7600 - RNA, 21 nt, synthetic construct
  source 1..21: mol_type = other RNA
gacaagaggctagccggaagc

SEQ ID NO: 7601 - RNA, 21 nt, synthetic construct
  source 1..21: mol_type = other RNA
gacaagcaaggactctataga

SEQ ID NO: 7602 - RNA, 21 nt, synthetic construct
  source 1..21: mol_type = other RNA
gacaagcaggcggcgggtaaa

SEQ ID NO: 7603 - RNA, 21 nt, synthetic construct
  source 1..21: mol_type = other RNA
gacaagcccgacctgctacag

SEQ ID NO: 7604 - RNA, 21 nt, synthetic construct
  source 1..21: mol_type = other RNA
gacaaggtaagggtccgacag

SEQ ID NO: 7605 - RNA, 21 nt, synthetic construct
  source 1..21: mol_type = other RNA
gacacaatctggctcaactcc

SEQ ID NO: 7606 - RNA, 21 nt, synthetic construct
  source 1..21: mol_type = other RNA
gacacctgattggctgtcgaa

SEQ ID NO: 7607 - RNA, 21 nt, synthetic construct
  source 1..21: mol_type = other RNA
gacacgccccctcccgccgcg

SEQ ID NO: 7608 - RNA, 21 nt, synthetic construct
  source 1..21: mol_type = other RNA
gacacgctgtggcacacgcca

SEQ ID NO: 7609 - RNA, 21 nt, synthetic construct
  source 1..21: mol_type = other RNA
gacactgcggcgctcggcctc

SEQ ID NO: 7610 - RNA, 21 nt, synthetic construct
  source 1..21: mol_type = other RNA
gacagaaaagagaccgaacct

SEQ ID NO: 7611 - RNA, 21 nt, synthetic construct
  source 1..21: mol_type = other RNA
gacagacaactctgatcgctc

SEQ ID NO: 7612 - RNA, 21 nt, synthetic construct
  source 1..21: mol_type = other RNA
gacagccaatcaggtgtcgaa

SEQ ID NO: 7613 - RNA, 21 nt, synthetic construct
  source 1..21: mol_type = other RNA
gacaggagctttactccaacc

SEQ ID NO: 7614 - RNA, 21 nt, synthetic construct
  source 1..21: mol_type = other RNA
gaccactgacgcccaagaagt

SEQ ID NO: 7615 - RNA, 21 nt, synthetic construct
  source 1..21: mol_type = other RNA
gacccaactccccctttcatg

SEQ ID NO: 7616 - RNA, 21 nt, synthetic construct
  source 1..21: mol_type = other RNA
gacccaaggagagcgagcgcg

SEQ ID NO: 7617 - RNA, 21 nt, synthetic construct
  source 1..21: mol_type = other RNA
gacccaggaaaaacatgaaag

SEQ ID NO: 7618 - RNA, 21 nt, synthetic construct
  source 1..21: mol_type = other RNA
gacccccgctcctcccccacc

SEQ ID NO: 7619 - RNA, 21 nt, synthetic construct
  source 1..21: mol_type = other RNA
gacccttaccttgtcccaggc

SEQ ID NO: 7620 - RNA, 21 nt, synthetic construct
  source 1..21: mol_type = other RNA
gacccttccctcccctggggc

SEQ ID NO: 7621 - RNA, 21 nt, synthetic construct
  source 1..21: mol_type = other RNA
gaccgaacctcacgatcgggc

SEQ ID NO: 7622 - RNA, 21 nt, synthetic construct
  source 1..21: mol_type = other RNA
gaccgacccccgctcctcccc

SEQ ID NO: 7623 - RNA, 21 nt, synthetic construct
  source 1..21: mol_type = other RNA
gaccgcacggggattcccagc

SEQ ID NO: 7624 - RNA, 21 nt, synthetic construct
  source 1..21: mol_type = other RNA
gaccgggcccttgctactggc

SEQ ID NO: 7625 - RNA, 21 nt, synthetic construct
  source 1..21: mol_type = other RNA
gaccgtaccaacgcccgcctc

SEQ ID NO: 7626 - RNA, 21 nt, synthetic construct
  source 1..21: mol_type = other RNA
gacctgctacaggcactcgtg

SEQ ID NO: 7627 - RNA, 21 nt, synthetic construct
  source 1..21: mol_type = other RNA
gacgcccaagaagtgagacaa

SEQ ID NO: 7628 - RNA, 21 nt, synthetic construct
  source 1..21: mol_type = other RNA
gacgcccgcgccagagccgat

SEQ ID NO: 7629 - RNA, 21 nt, synthetic construct
  source 1..21: mol_type = other RNA
gacgccttccctctcgttttc

SEQ ID NO: 7630 - RNA, 21 nt, synthetic construct
  source 1..21: mol_type = other RNA
gacgcttcccctcccccaacg

SEQ ID NO: 7631 - RNA, 21 nt, synthetic construct
  source 1..21: mol_type = other RNA
gacggagccattgctctcgca

SEQ ID NO: 7632 - RNA, 21 nt, synthetic construct
  source 1..21: mol_type = other RNA
gacggaggaggtgacccttcc

SEQ ID NO: 7633 - RNA, 21 nt, synthetic construct
  source 1..21: mol_type = other RNA
gacggcccccctagccaccca

SEQ ID NO: 7634 - RNA, 21 nt, synthetic construct
  source 1..21: mol_type = other RNA
gacggcgtaactgacaggagc

SEQ ID NO: 7635 - RNA, 21 nt, synthetic construct
  source 1..21: mol_type = other RNA
gactcacgcagccccagtccc

SEQ ID NO: 7636 - RNA, 21 nt, synthetic construct
  source 1..21: mol_type = other RNA
gactcccccgaaggaagggga

SEQ ID NO: 7637 - RNA, 21 nt, synthetic construct
  source 1..21: mol_type = other RNA
gactcgagccagtagcaaggg

SEQ ID NO: 7638 - RNA, 21 nt, synthetic construct
  source 1..21: mol_type = other RNA
gactcgagttaggcccaacgc

SEQ ID NO: 7639 - RNA, 21 nt, synthetic construct
  source 1..21: mol_type = other RNA
gactctatagaatcaattagc

SEQ ID NO: 7640 - RNA, 21 nt, synthetic construct
  source 1..21: mol_type = other RNA
gactctcgcgttgccccctgg

SEQ ID NO: 7641 - RNA, 21 nt, synthetic construct
  source 1..21: mol_type = other RNA
gactgcagcatccatatccaa

SEQ ID NO: 7642 - RNA, 21 nt, synthetic construct
  source 1..21: mol_type = other RNA
gactggcgggactggggctgc

SEQ ID NO: 7643 - RNA, 21 nt, synthetic construct
  source 1..21: mol_type = other RNA
gactggggctgcgtgagtctc

SEQ ID NO: 7644 - RNA, 21 nt, synthetic construct
  source 1..21: mol_type = other RNA
gacttacacgcagagggaaag

SEQ ID NO: 7645 - RNA, 21 nt, synthetic construct
  source 1..21: mol_type = other RNA
gacttcccacgggaaaggcaa

SEQ ID NO: 7646 - RNA, 21 nt, synthetic construct
  source 1..21: mol_type = other RNA
gacttctggatggcggcggcc

SEQ ID NO: 7647 - RNA, 21 nt, synthetic construct
  source 1..21: mol_type = other RNA
gagaaacggccaatcggcgac

SEQ ID NO: 7648 - RNA, 21 nt, synthetic construct
  source 1..21: mol_type = other RNA
gagaaagaccactgacgccca

SEQ ID NO: 7649 - RNA, 21 nt, synthetic construct
  source 1..21: mol_type = other RNA
gagaacgatcttgtgagaata

SEQ ID NO: 7650 - RNA, 21 nt, synthetic construct
  source 1..21: mol_type = other RNA
gagaacgggggtagggagtgg

SEQ ID NO: 7651 - RNA, 21 nt, synthetic construct
  source 1..21: mol_type = other RNA
gagaacgtgtggtgggggtgg

SEQ ID NO: 7652 - RNA, 21 nt, synthetic construct
  source 1..21: mol_type = other RNA
gagaagaggctgtgcttcggc

SEQ ID NO: 7653 - RNA, 21 nt, synthetic construct
  source 1..21: mol_type = other RNA
gagaagggagcggaaaatgct

SEQ ID NO: 7654 - RNA, 21 nt, synthetic construct
  source 1..21: mol_type = other RNA
gagaagtggcagcatcctcct

SEQ ID NO: 7655 - RNA, 21 nt, synthetic construct
  source 1..21: mol_type = other RNA
gagaatatcttcaaaggcaga

SEQ ID NO: 7656 - RNA, 21 nt, synthetic construct
  source 1..21: mol_type = other RNA
gagaattcataaagggaatat

SEQ ID NO: 7657 - RNA, 21 nt, synthetic construct
  source 1..21: mol_type = other RNA
gagacaagcaaggactctata

SEQ ID NO: 7658 - RNA, 21 nt, synthetic construct
  source 1..21: mol_type = other RNA
gagacaagcccgacctgctac

SEQ ID NO: 7659 - RNA, 21 nt, synthetic construct
  source 1..21: mol_type = other RNA
gagaccgaacctcacgatcgg

SEQ ID NO: 7660 - RNA, 21 nt, synthetic construct
  source 1..21: mol_type = other RNA
gagacggaggaggtgaccctt

SEQ ID NO: 7661 - RNA, 21 nt, synthetic construct
  source 1..21: mol_type = other RNA
gagactcacgcagccccagtc

SEQ ID NO: 7662 - RNA, 21 nt, synthetic construct
  source 1..21: mol_type = other RNA
gagactcgagccagtagcaag

SEQ ID NO: 7663 - RNA, 21 nt, synthetic construct
  source 1..21: mol_type = other RNA
gagacttctggatggcggcgg

SEQ ID NO: 7664 - RNA, 21 nt, synthetic construct
  source 1..21: mol_type = other RNA
gagagagatccccctctaatc

SEQ ID NO: 7665 - RNA, 21 nt, synthetic construct
  source 1..21: mol_type = other RNA
gagagatccccctctaatcta

SEQ ID NO: 7666 - RNA, 21 nt, synthetic construct
  source 1..21: mol_type = other RNA
gagagcaatggctccgtccgg

SEQ ID NO: 7667 - RNA, 21 nt, synthetic construct
  source 1..21: mol_type = other RNA
gagagcctcggctaggtaggg

SEQ ID NO: 7668 - RNA, 21 nt, synthetic construct
  source 1..21: mol_type = other RNA
gagagcgagcgcggggagacg

SEQ ID NO: 7669 - RNA, 21 nt, synthetic construct
  source 1..21: mol_type = other RNA
gagaggccaatggcgcggcgg

SEQ ID NO: 7670 - RNA, 21 nt, synthetic construct
  source 1..21: mol_type = other RNA
gagaggcctcttgctgccctc

SEQ ID NO: 7671 - RNA, 21 nt, synthetic construct
  source 1..21: mol_type = other RNA
gagagggaaagttaaactgtt

SEQ ID NO: 7672 - RNA, 21 nt, synthetic construct
  source 1..21: mol_type = other RNA
gagagggaaggcgtccaggaa

SEQ ID NO: 7673 - RNA, 21 nt, synthetic construct
  source 1..21: mol_type = other RNA
gagagtcgctaagcggctgcg

SEQ ID NO: 7674 - RNA, 21 nt, synthetic construct
  source 1..21: mol_type = other RNA
gagatagcctcgttgaatgtg

SEQ ID NO: 7675 - RNA, 21 nt, synthetic construct
  source 1..21: mol_type = other RNA
gagatccccctctaatctagg

SEQ ID NO: 7676 - RNA, 21 nt, synthetic construct
  source 1..21: mol_type = other RNA
gagatcgcggcccccagagcg

SEQ ID NO: 7677 - RNA, 21 nt, synthetic construct
  source 1..21: mol_type = other RNA
gagatgctgggtgtgcgggcg

SEQ ID NO: 7678 - RNA, 21 nt, synthetic construct
  source 1..21: mol_type = other RNA
gagcaatggctccgtccggtt

SEQ ID NO: 7679 - RNA, 21 nt, synthetic construct
  source 1..21: mol_type = other RNA
gagcattttccgctcccttct

SEQ ID NO: 7680 - RNA, 21 nt, synthetic construct
  source 1..21: mol_type = other RNA
gagccagagaacgtgtggtgg

SEQ ID NO: 7681 - RNA, 21 nt, synthetic construct
  source 1..21: mol_type = other RNA
gagccagattgtgtcgtttta

SEQ ID NO: 7682 - RNA, 21 nt, synthetic construct
  source 1..21: mol_type = other RNA
gagccagtagcaagggcccgg

SEQ ID NO: 7683 - RNA, 21 nt, synthetic construct
  source 1..21: mol_type = other RNA
gagccattgctctcgcagagg

SEQ ID NO: 7684 - RNA, 21 nt, synthetic construct
  source 1..21: mol_type = other RNA
gagccctggttcaagtaggta

SEQ ID NO: 7685 - RNA, 21 nt, synthetic construct
  source 1..21: mol_type = other RNA
gagccgatttcactgaccctc

SEQ ID NO: 7686 - RNA, 21 nt, synthetic construct
  source 1..21: mol_type = other RNA
gagccgcggccgccgccatcc

SEQ ID NO: 7687 - RNA, 21 nt, synthetic construct
  source 1..21: mol_type = other RNA
gagccggagcgccgaagcaca

SEQ ID NO: 7688 - RNA, 21 nt, synthetic construct
  source 1..21: mol_type = other RNA
gagcctcggctaggtagggga

SEQ ID NO: 7689 - RNA, 21 nt, synthetic construct
  source 1..21: mol_type = other RNA
gagcctggagttgagccagat

SEQ ID NO: 7690 - RNA, 21 nt, synthetic construct
  source 1..21: mol_type = other RNA
gagcgaaaccactgcgcgggg

SEQ ID NO: 7691 - RNA, 21 nt, synthetic construct
  source 1..21: mol_type = other RNA
gagcgagcgcggggagacgga

SEQ ID NO: 7692 - RNA, 21 nt, synthetic construct
  source 1..21: mol_type = other RNA
gagcgatcagagttgtctgtc

SEQ ID NO: 7693 - RNA, 21 nt, synthetic construct
  source 1..21: mol_type = other RNA
gagcgccgaagcacagcctct

SEQ ID NO: 7694 - RNA, 21 nt, synthetic construct
  source 1..21: mol_type = other RNA
gagcgcggggagacggaggag

SEQ ID NO: 7695 - RNA, 21 nt, synthetic construct
  source 1..21: mol_type = other RNA
gagcgcttccggctagcctct

SEQ ID NO: 7696 - RNA, 21 nt, synthetic construct
  source 1..21: mol_type = other RNA
gagcggaaaatgctcgaaacc

SEQ ID NO: 7697 - RNA, 21 nt, synthetic construct
  source 1..21: mol_type = other RNA
gagcggaaacgccactgaccg

SEQ ID NO: 7698 - RNA, 21 nt, synthetic construct
  source 1..21: mol_type = other RNA
gagcggaactctggtgggagg

SEQ ID NO: 7699 - RNA, 21 nt, synthetic construct
  source 1..21: mol_type = other RNA
gagcggagggcagcaagaggc

SEQ ID NO: 7700 - RNA, 21 nt, synthetic construct
  source 1..21: mol_type = other RNA
gagcttggggagggccaggcc

SEQ ID NO: 7701 - RNA, 21 nt, synthetic construct
  source 1..21: mol_type = other RNA
gagctttactccaaccagaat

SEQ ID NO: 7702 - RNA, 21 nt, synthetic construct
  source 1..21: mol_type = other RNA
gaggaccgtaccaacgcccgc

SEQ ID NO: 7703 - RNA, 21 nt, synthetic construct
  source 1..21: mol_type = other RNA
gaggacgcccgcgccagagcc

SEQ ID NO: 7704 - RNA, 21 nt, synthetic construct
  source 1..21: mol_type = other RNA
gaggagaaacggccaatcggc

SEQ ID NO: 7705 - RNA, 21 nt, synthetic construct
  source 1..21: mol_type = other RNA
gaggagaggcctcttgctgcc

SEQ ID NO: 7706 - RNA, 21 nt, synthetic construct
  source 1..21: mol_type = other RNA
gaggagccggagcgccgaagc

SEQ ID NO: 7707 - RNA, 21 nt, synthetic construct
  source 1..21: mol_type = other RNA
gaggagcgcttccggctagcc

SEQ ID NO: 7708 - RNA, 21 nt, synthetic construct
  source 1..21: mol_type = other RNA
gaggaggtgacccttccctcc

SEQ ID NO: 7709 - RNA, 21 nt, synthetic construct
  source 1..21: mol_type = other RNA
gaggagtgtaggaaagagccc

SEQ ID NO: 7710 - RNA, 21 nt, synthetic construct
  source 1..21: mol_type = other RNA
gaggatgctgccacttctcac

SEQ ID NO: 7711 - RNA, 21 nt, synthetic construct
  source 1..21: mol_type = other RNA
gaggccaatggcgcggcggga

SEQ ID NO: 7712 - RNA, 21 nt, synthetic construct
  source 1..21: mol_type = other RNA
gaggccgagcgccgcagtgtc

SEQ ID NO: 7713 - RNA, 21 nt, synthetic construct
  source 1..21: mol_type = other RNA
gaggccggccgcgcccgcaca

SEQ ID NO: 7714 - RNA, 21 nt, synthetic construct
  source 1..21: mol_type = other RNA
gaggcctctcctcaagggaaa

SEQ ID NO: 7715 - RNA, 21 nt, synthetic construct
  source 1..21: mol_type = other RNA
gaggcctcttgctgccctccg

SEQ ID NO: 7716 - RNA, 21 nt, synthetic construct
  source 1..21: mol_type = other RNA
gaggcggcaggactcgagtta

SEQ ID NO: 7717 - RNA, 21 nt, synthetic construct
  source 1..21: mol_type = other RNA
gaggcgggcgttggtacggtc

SEQ ID NO: 7718 - RNA, 21 nt, synthetic construct
  source 1..21: mol_type = other RNA
gaggcgttgggggaggggaag

SEQ ID NO: 7719 - RNA, 21 nt, synthetic construct
  source 1..21: mol_type = other RNA
gaggctagccggaagcgctcc

SEQ ID NO: 7720 - RNA, 21 nt, synthetic construct
  source 1..21: mol_type = other RNA
gaggctatctcagacacgctg

SEQ ID NO: 7721 - RNA, 21 nt, synthetic construct
  source 1..21: mol_type = other RNA
gaggctctctgaggagccgga

SEQ ID NO: 7722 - RNA, 21 nt, synthetic construct
  source 1..21: mol_type = other RNA
gaggctgtgcttcggcgctcc

SEQ ID NO: 7723 - RNA, 21 nt, synthetic construct
  source 1..21: mol_type = other RNA
gagggaaagagaattcataaa

SEQ ID NO: 7724 - RNA, 21 nt, synthetic construct
  source 1..21: mol_type = other RNA
gagggaaaggggtggctggat

SEQ ID NO: 7725 - RNA, 21 nt, synthetic construct
  source 1..21: mol_type = other RNA
gagggaaagttaaactgttgg

SEQ ID NO: 7726 - RNA, 21 nt, synthetic construct
  source 1..21: mol_type = other RNA
gagggaaggcgtccaggaaga

SEQ ID NO: 7727 - RNA, 21 nt, synthetic construct
  source 1..21: mol_type = other RNA
gagggaagggtcacctcctcc

SEQ ID NO: 7728 - RNA, 21 nt, synthetic construct
  source 1..21: mol_type = other RNA
gagggagaagggagcggaaaa

SEQ ID NO: 7729 - RNA, 21 nt, synthetic construct
  source 1..21: mol_type = other RNA
gagggaggagcgcttccggct

SEQ ID NO: 7730 - RNA, 21 nt, synthetic construct
  source 1..21: mol_type = other RNA
gagggaggcccgccctgcggc

SEQ ID NO: 7731 - RNA, 21 nt, synthetic construct
  source 1..21: mol_type = other RNA
gagggcagcaagaggcctctc

SEQ ID NO: 7732 - RNA, 21 nt, synthetic construct
  source 1..21: mol_type = other RNA
gagggccaggcccacgaccca

SEQ ID NO: 7733 - RNA, 21 nt, synthetic construct
  source 1..21: mol_type = other RNA
gaggggaagcgtcctgaccca

SEQ ID NO: 7734 - RNA, 21 nt, synthetic construct
  source 1..21: mol_type = other RNA
gaggggagatcgcggccccca

SEQ ID NO: 7735 - RNA, 21 nt, synthetic construct
  source 1..21: mol_type = other RNA
gaggggagggtcagtgaaatc

SEQ ID NO: 7736 - RNA, 21 nt, synthetic construct
  source 1..21: mol_type = other RNA
gaggggaggtgcggtacactg

SEQ ID NO: 7737 - RNA, 21 nt, synthetic construct
  source 1..21: mol_type = other RNA
gagggggagggagaagggagc

SEQ ID NO: 7738 - RNA, 21 nt, synthetic construct
  source 1..21: mol_type = other RNA
gagggggatctctctccctgg

SEQ ID NO: 7739 - RNA, 21 nt, synthetic construct
  source 1..21: mol_type = other RNA
gaggggggccggcactactgt

SEQ ID NO: 7740 - RNA, 21 nt, synthetic construct
  source 1..21: mol_type = other RNA
gaggggggtgagaagtggcag

SEQ ID NO: 7741 - RNA, 21 nt, synthetic construct
  source 1..21: mol_type = other RNA
gagggtcagtgaaatcggctc

SEQ ID NO: 7742 - RNA, 21 nt, synthetic construct
  source 1..21: mol_type = other RNA
gagggtgggaggacgcccgcg

SEQ ID NO: 7743 - RNA, 21 nt, synthetic construct
  source 1..21: mol_type = other RNA
gaggtgacccttccctcccct

SEQ ID NO: 7744 - RNA, 21 nt, synthetic construct
  source 1..21: mol_type = other RNA
gaggtgcggtacactgggggg

SEQ ID NO: 7745 - RNA, 21 nt, synthetic construct
  source 1..21: mol_type = other RNA
gaggtgggaagccagaaaacg

SEQ ID NO: 7746 - RNA, 21 nt, synthetic construct
  source 1..21: mol_type = other RNA
gaggtgggggtggggggcaga

SEQ ID NO: 7747 - RNA, 21 nt, synthetic construct
  source 1..21: mol_type = other RNA
gaggttcggtctcttttctgt

SEQ ID NO: 7748 - RNA, 21 nt, synthetic construct
  source 1..21: mol_type = other RNA
gagtaaagctcctgtcagtta

SEQ ID NO: 7749 - RNA, 21 nt, synthetic construct
  source 1..21: mol_type = other RNA
gagtacgcagccgcttagcga

SEQ ID NO: 7750 - RNA, 21 nt, synthetic construct
  source 1..21: mol_type = other RNA
gagtaggcagttcccaggaaa

SEQ ID NO: 7751 - RNA, 21 nt, synthetic construct
  source 1..21: mol_type = other RNA
gagtcctgccgcctcccggga

SEQ ID NO: 7752 - RNA, 21 nt, synthetic construct
  source 1..21: mol_type = other RNA
gagtccttgcttgtctcactt

SEQ ID NO: 7753 - RNA, 21 nt, synthetic construct
  source 1..21: mol_type = other RNA
gagtcgctaagcggctgcgta

SEQ ID NO: 7754 - RNA, 21 nt, synthetic construct
  source 1..21: mol_type = other RNA
gagtcggtttacccgccgcct

SEQ ID NO: 7755 - RNA, 21 nt, synthetic construct
  source 1..21: mol_type = other RNA
gagtctcacatgagcgaaacc

SEQ ID NO: 7756 - RNA, 21 nt, synthetic construct
  source 1..21: mol_type = other RNA
gagtctctgagcgcaggcggg

SEQ ID NO: 7757 - RNA, 21 nt, synthetic construct
  source 1..21: mol_type = other RNA
gagtgcctgtagcaggtcggg

SEQ ID NO: 7758 - RNA, 21 nt, synthetic construct
  source 1..21: mol_type = other RNA
gagtgggccaatgggtgcggg

SEQ ID NO: 7759 - RNA, 21 nt, synthetic construct
  source 1..21: mol_type = other RNA
gagtgtaggaaagagccctgg

SEQ ID NO: 7760 - RNA, 21 nt, synthetic construct
  source 1..21: mol_type = other RNA
gagttaggcccaacgcggcgc

SEQ ID NO: 7761 - RNA, 21 nt, synthetic construct
  source 1..21: mol_type = other RNA
gagttccgctcccctacctag

SEQ ID NO: 7762 - RNA, 21 nt, synthetic construct
  source 1..21: mol_type = other RNA
gagttgagccagattgtgtcg

SEQ ID NO: 7763 - RNA, 21 nt, synthetic construct
  source 1..21: mol_type = other RNA
gagttgggtcgcctagattag

SEQ ID NO: 7764 - RNA, 21 nt, synthetic construct
  source 1..21: mol_type = other RNA
gagttgtctgtcacaaggccg

SEQ ID NO: 7765 - RNA, 21 nt, synthetic construct
  source 1..21: mol_type = other RNA
gatagcctcgttgaatgtgta

SEQ ID NO: 7766 - RNA, 21 nt, synthetic construct
  source 1..21: mol_type = other RNA
gatattctcacaagatcgttc

SEQ ID NO: 7767 - RNA, 21 nt, synthetic construct
  source 1..21: mol_type = other RNA
gatcagagttgtctgtcacaa

SEQ ID NO: 7768 - RNA, 21 nt, synthetic construct
  source 1..21: mol_type = other RNA
gatcccccactccctaccccc

SEQ ID NO: 7769 - RNA, 21 nt, synthetic construct
  source 1..21: mol_type = other RNA
gatccccctctaatctaggcg

SEQ ID NO: 7770 - RNA, 21 nt, synthetic construct
  source 1..21: mol_type = other RNA
gatcgcggcccccagagcgat

SEQ ID NO: 7771 - RNA, 21 nt, synthetic construct
  source 1..21: mol_type = other RNA
gatcgctctgggggccgcgat

SEQ ID NO: 7772 - RNA, 21 nt, synthetic construct
  source 1..21: mol_type = other RNA
gatcgggccccaggggaggga

SEQ ID NO: 7773 - RNA, 21 nt, synthetic construct
  source 1..21: mol_type = other RNA
gatcgtgaggttcggtctctt

SEQ ID NO: 7774 - RNA, 21 nt, synthetic construct
  source 1..21: mol_type = other RNA
gatcgttctccacgcccaagg

SEQ ID NO: 7775 - RNA, 21 nt, synthetic construct
  source 1..21: mol_type = other RNA
gatctcccctccgtaatcttc

SEQ ID NO: 7776 - RNA, 21 nt, synthetic construct
  source 1..21: mol_type = other RNA
gatctctctccctgggaaaat

SEQ ID NO: 7777 - RNA, 21 nt, synthetic construct
  source 1..21: mol_type = other RNA
gatcttgtgagaatatcttca

SEQ ID NO: 7778 - RNA, 21 nt, synthetic construct
  source 1..21: mol_type = other RNA
gatgcaggcgggagggaggcc

SEQ ID NO: 7779 - RNA, 21 nt, synthetic construct
  source 1..21: mol_type = other RNA
gatgctgccacttctcacccc

SEQ ID NO: 7780 - RNA, 21 nt, synthetic construct
  source 1..21: mol_type = other RNA
gatgctgggtgtgcgggcgcg

SEQ ID NO: 7781 - RNA, 21 nt, synthetic construct
  source 1..21: mol_type = other RNA
gatggctgcttcccaaaggca

SEQ ID NO: 7782 - RNA, 21 nt, synthetic construct
  source 1..21: mol_type = other RNA
gatgggtggctaggggggccg

SEQ ID NO: 7783 - RNA, 21 nt, synthetic construct
  source 1..21: mol_type = other RNA
gattacggaggggagatcgcg

SEQ ID NO: 7784 - RNA, 21 nt, synthetic construct
  source 1..21: mol_type = other RNA
gattagagggggatctctctc

SEQ ID NO: 7785 - RNA, 21 nt, synthetic construct
  source 1..21: mol_type = other RNA
gattcccagcgccggcgccag

SEQ ID NO: 7786 - RNA, 21 nt, synthetic construct
  source 1..21: mol_type = other RNA
gattctatagagtccttgctt

SEQ ID NO: 7787 - RNA, 21 nt, synthetic construct
  source 1..21: mol_type = other RNA
gattggccgtttctcctcccg

SEQ ID NO: 7788 - RNA, 21 nt, synthetic construct
  source 1..21: mol_type = other RNA
gattggcggcgagtgggccaa

SEQ ID NO: 7789 - RNA, 21 nt, synthetic construct
  source 1..21: mol_type = other RNA
gattggctgtcgaagctgtgg

SEQ ID NO: 7790 - RNA, 21 nt, synthetic construct
  source 1..21: mol_type = other RNA
gattgtgtcgttttacttgcc

SEQ ID NO: 7791 - RNA, 21 nt, synthetic construct
  source 1..21: mol_type = other RNA
gatttacctacttgaaccagg

SEQ ID NO: 7792 - RNA, 21 nt, synthetic construct
  source 1..21: mol_type = other RNA
gatttcactgaccctcccctc

SEQ ID NO: 7793 - RNA, 21 nt, synthetic construct
  source 1..21: mol_type = other RNA
gcaacaccccattttcccagg

SEQ ID NO: 7794 - RNA, 21 nt, synthetic construct
  source 1..21: mol_type = other RNA
gcaacccccgcaagccaccag

SEQ ID NO: 7795 - RNA, 21 nt, synthetic construct
  source 1..21: mol_type = other RNA
gcaaccggagggggagggaga

SEQ ID NO: 7796 - RNA, 21 nt, synthetic construct
  source 1..21: mol_type = other RNA
gcaacgcgagagtcgctaagc

SEQ ID NO: 7797 - RNA, 21 nt, synthetic construct
  source 1..21: mol_type = other RNA
gcaacggtgtgtgcaaggcgg

SEQ ID NO: 7798 - RNA, 21 nt, synthetic construct
  source 1..21: mol_type = other RNA
gcaacgtggcaggaagcgcgc

SEQ ID NO: 7799 - RNA, 21 nt, synthetic construct
  source 1..21: mol_type = other RNA
gcaagaggcctctcctcaagg

SEQ ID NO: 7800 - RNA, 21 nt, synthetic construct
  source 1..21: mol_type = other RNA
gcaagccaccagacggccccc

SEQ ID NO: 7801 - RNA, 21 nt, synthetic construct
  source 1..21: mol_type = other RNA
gcaaggactctatagaatcaa

SEQ ID NO: 7802 - RNA, 21 nt, synthetic construct
  source 1..21: mol_type = other RNA
gcaaggcggcgaggggggtga

SEQ ID NO: 7803 - RNA, 21 nt, synthetic construct
  source 1..21: mol_type = other RNA
gcaagggcccggtcccacagc

SEQ ID NO: 7804 - RNA, 21 nt, synthetic construct
  source 1..21: mol_type = other RNA
gcaagtaaaacgacacaatct

SEQ ID NO: 7805 - RNA, 21 nt, synthetic construct
  source 1..21: mol_type = other RNA
gcaatggctccgtccggtttc

SEQ ID NO: 7806 - RNA, 21 nt, synthetic construct
  source 1..21: mol_type = other RNA
gcacacaccgttgcaacaccc

SEQ ID NO: 7807 - RNA, 21 nt, synthetic construct
  source 1..21: mol_type = other RNA
gcacacccagcatctctacac

SEQ ID NO: 7808 - RNA, 21 nt, synthetic construct
  source 1..21: mol_type = other RNA
gcacacgccacggggagccag

SEQ ID NO: 7809 - RNA, 21 nt, synthetic construct
  source 1..21: mol_type = other RNA
gcacagcctcttctctaggcg

SEQ ID NO: 7810 - RNA, 21 nt, synthetic construct
  source 1..21: mol_type = other RNA
gcacccattggcccactcgcc

SEQ ID NO: 7811 - RNA, 21 nt, synthetic construct
  source 1..21: mol_type = other RNA
gcacctcccctcccaccagag

SEQ ID NO: 7812 - RNA, 21 nt, synthetic construct
  source 1..21: mol_type = other RNA
gcacggcactcccgggaggcg

SEQ ID NO: 7813 - RNA, 21 nt, synthetic construct
  source 1..21: mol_type = other RNA
gcacggggattcccagcgccg

SEQ ID NO: 7814 - RNA, 21 nt, synthetic construct
  source 1..21: mol_type = other RNA
gcactactgtgttggcggact

SEQ ID NO: 7815 - RNA, 21 nt, synthetic construct
  source 1..21: mol_type = other RNA
gcactcccgggaggcggcagg

SEQ ID NO: 7816 - RNA, 21 nt, synthetic construct
  source 1..21: mol_type = other RNA
gcactcgtgggggtgggggag

SEQ ID NO: 7817 - RNA, 21 nt, synthetic construct
  source 1..21: mol_type = other RNA
gcagaaaaatattccctttat

SEQ ID NO: 7818 - RNA, 21 nt, synthetic construct
  source 1..21: mol_type = other RNA
gcagaaaggcggagcgagcca

SEQ ID NO: 7819 - RNA, 21 nt, synthetic construct
  source 1..21: mol_type = other RNA
gcagagggaaagagaattcat

SEQ ID NO: 7820 - RNA, 21 nt, synthetic construct
  source 1..21: mol_type = other RNA
gcagagggaggagcgcttccg

SEQ ID NO: 7821 - RNA, 21 nt, synthetic construct
  source 1..21: mol_type = other RNA
gcagcaagaggcctctcctca

SEQ ID NO: 7822 - RNA, 21 nt, synthetic construct
  source 1..21: mol_type = other RNA
gcagcatccatatccaagaga

SEQ ID NO: 7823 - RNA, 21 nt, synthetic construct
  source 1..21: mol_type = other RNA
gcagcatcctcctaagagctt

SEQ ID NO: 7824 - RNA, 21 nt, synthetic construct
  source 1..21: mol_type = other RNA
gcagccatctgaggtgggaag

SEQ ID NO: 7825 - RNA, 21 nt, synthetic construct
  source 1..21: mol_type = other RNA
gcagccccagtcccgccagtc

SEQ ID NO: 7826 - RNA, 21 nt, synthetic construct
  source 1..21: mol_type = other RNA
gcagccgcttagcgactctcg

SEQ ID NO: 7827 - RNA, 21 nt, synthetic construct
  source 1..21: mol_type = other RNA
gcagcgcctgggacaaggtaa

SEQ ID NO: 7828 - RNA, 21 nt, synthetic construct
  source 1..21: mol_type = other RNA
gcagcgggctgagtgagctgc

SEQ ID NO: 7829 - RNA, 21 nt, synthetic construct
  source 1..21: mol_type = other RNA
gcagctcactcagcccgctgc

SEQ ID NO: 7830 - RNA, 21 nt, synthetic construct
  source 1..21: mol_type = other RNA
gcaggactcgagttaggccca

SEQ ID NO: 7831 - RNA, 21 nt, synthetic construct
  source 1..21: mol_type = other RNA
gcaggcggcgggtaaaccgac

SEQ ID NO: 7832 - RNA, 21 nt, synthetic construct
  source 1..21: mol_type = other RNA
gcagggccagggaaagagggg

SEQ ID NO: 7833 - RNA, 21 nt, synthetic construct
  source 1..21: mol_type = other RNA
gcagggcgggcctccctcccg

SEQ ID NO: 7834 - RNA, 21 nt, synthetic construct
  source 1..21: mol_type = other RNA
gcaggtcgggcttgtctcgcc

SEQ ID NO: 7835 - RNA, 21 nt, synthetic construct
  source 1..21: mol_type = other RNA
gcagtggtttcgctcatgtga

SEQ ID NO: 7836 - RNA, 21 nt, synthetic construct
  source 1..21: mol_type = other RNA
gcagtgtctggccccgcgccc

SEQ ID NO: 7837 - RNA, 21 nt, synthetic construct
  source 1..21: mol_type = other RNA
gcagttcccaggaaagggggt

SEQ ID NO: 7838 - RNA, 21 nt, synthetic construct
  source 1..21: mol_type = other RNA
gcatagaaggggctttcccaa

SEQ ID NO: 7839 - RNA, 21 nt, synthetic construct
  source 1..21: mol_type = other RNA
gcatccagccacccctttccc

SEQ ID NO: 7840 - RNA, 21 nt, synthetic construct
  source 1..21: mol_type = other RNA
gcatccatatccaagagaaag

SEQ ID NO: 7841 - RNA, 21 nt, synthetic construct
  source 1..21: mol_type = other RNA
gcatcctcctaagagcttggg

SEQ ID NO: 7842 - RNA, 21 nt, synthetic construct
  source 1..21: mol_type = other RNA
gcatctctacaccccacctac

SEQ ID NO: 7843 - RNA, 21 nt, synthetic construct
  source 1..21: mol_type = other RNA
gcatgagagggaaagttaaac

SEQ ID NO: 7844 - RNA, 21 nt, synthetic construct
  source 1..21: mol_type = other RNA
gcattaccttcgccaccccca

SEQ ID NO: 7845 - RNA, 21 nt, synthetic construct
  source 1..21: mol_type = other RNA
gcattttccgctcccttctcc

SEQ ID NO: 7846 - RNA, 21 nt, synthetic construct
  source 1..21: mol_type = other RNA
gccaacacagtagtgccggcc

SEQ ID NO: 7847 - RNA, 21 nt, synthetic construct
  source 1..21: mol_type = other RNA
gccaatcagcggaagccgccg

SEQ ID NO: 7848 - RNA, 21 nt, synthetic construct
  source 1..21: mol_type = other RNA
gccaatcaggtgtcgaagaca

SEQ ID NO: 7849 - RNA, 21 nt, synthetic construct
  source 1..21: mol_type = other RNA
gccaatcggcgacaagaggct

SEQ ID NO: 7850 - RNA, 21 nt, synthetic construct
  source 1..21: mol_type = other RNA
gccaatggcgcggcgggaggg

SEQ ID NO: 7851 - RNA, 21 nt, synthetic construct
  source 1..21: mol_type = other RNA
gccaatgggtgcggggcggtg

SEQ ID NO: 7852 - RNA, 21 nt, synthetic construct
  source 1..21: mol_type = other RNA
gccacagcgtgtctgagatag

SEQ ID NO: 7853 - RNA, 21 nt, synthetic construct
  source 1..21: mol_type = other RNA
gccaccagacggcccccctag

SEQ ID NO: 7854 - RNA, 21 nt, synthetic construct
  source 1..21: mol_type = other RNA
gccacccatccccccagtgta

SEQ ID NO: 7855 - RNA, 21 nt, synthetic construct
  source 1..21: mol_type = other RNA
gccacccccaccacacgttct

SEQ ID NO: 7856 - RNA, 21 nt, synthetic construct
  source 1..21: mol_type = other RNA
gccacccccgcgccccgcgca

SEQ ID NO: 7857 - RNA, 21 nt, synthetic construct
  source 1..21: mol_type = other RNA
gccacccctttccctcccaac

SEQ ID NO: 7858 - RNA, 21 nt, synthetic construct
  source 1..21: mol_type = other RNA
gccacggcgtttcctggccgg

SEQ ID NO: 7859 - RNA, 21 nt, synthetic construct
  source 1..21: mol_type = other RNA
gccacggggagccagagaacg

SEQ ID NO: 7860 - RNA, 21 nt, synthetic construct
  source 1..21: mol_type = other RNA
gccacgttgcgcaggggcgcg

SEQ ID NO: 7861 - RNA, 21 nt, synthetic construct
  source 1..21: mol_type = other RNA
gccactgaccgcacggggatt

SEQ ID NO: 7862 - RNA, 21 nt, synthetic construct
  source 1..21: mol_type = other RNA
gccacttctcacccccctcgc

SEQ ID NO: 7863 - RNA, 21 nt, synthetic construct
  source 1..21: mol_type = other RNA
gccagaaaacgagagggaagg

SEQ ID NO: 7864 - RNA, 21 nt, synthetic construct
  source 1..21: mol_type = other RNA
gccagacactgcggcgctcgg

SEQ ID NO: 7865 - RNA, 21 nt, synthetic construct
  source 1..21: mol_type = other RNA
gccagagaacgtgtggtgggg

SEQ ID NO: 7866 - RNA, 21 nt, synthetic construct
  source 1..21: mol_type = other RNA
gccagagccgatttcactgac

SEQ ID NO: 7867 - RNA, 21 nt, synthetic construct
  source 1..21: mol_type = other RNA
gccagattgtgtcgttttact

SEQ ID NO: 7868 - RNA, 21 nt, synthetic construct
  source 1..21: mol_type = other RNA
gccaggaaacgccgtggcgcc

SEQ ID NO: 7869 - RNA, 21 nt, synthetic construct
  source 1..21: mol_type = other RNA
gccaggcccacgacccaagga

SEQ ID NO: 7870 - RNA, 21 nt, synthetic construct
  source 1..21: mol_type = other RNA
gccagggaaagaggggggccg

SEQ ID NO: 7871 - RNA, 21 nt, synthetic construct
  source 1..21: mol_type = other RNA
gccagtagcaagggcccggtc

SEQ ID NO: 7872 - RNA, 21 nt, synthetic construct
  source 1..21: mol_type = other RNA
gccagtccgccaacacagtag

SEQ ID NO: 7873 - RNA, 21 nt, synthetic construct
  source 1..21: mol_type = other RNA
gccatccagaagtctcggccg

SEQ ID NO: 7874 - RNA, 21 nt, synthetic construct
  source 1..21: mol_type = other RNA
gccatctgaggtgggaagcca

SEQ ID NO: 7875 - RNA, 21 nt, synthetic construct
  source 1..21: mol_type = other RNA
gccattcccggccaggaaacg

SEQ ID NO: 7876 - RNA, 21 nt, synthetic construct
  source 1..21: mol_type = other RNA
gccattgctctcgcagaggga

SEQ ID NO: 7877 - RNA, 21 nt, synthetic construct
  source 1..21: mol_type = other RNA
gccattggcctctccgcccac

SEQ ID NO: 7878 - RNA, 21 nt, synthetic construct
  source 1..21: mol_type = other RNA
gccatttgtgttttcacacac

SEQ ID NO: 7879 - RNA, 21 nt, synthetic construct
  source 1..21: mol_type = other RNA
gcccaacgcggcgccacggcg

SEQ ID NO: 7880 - RNA, 21 nt, synthetic construct
  source 1..21: mol_type = other RNA
gcccaagaagtgagacaagca

SEQ ID NO: 7881 - RNA, 21 nt, synthetic construct
  source 1..21: mol_type = other RNA
gcccaaggcaagtaaaacgac

SEQ ID NO: 7882 - RNA, 21 nt, synthetic construct
  source 1..21: mol_type = other RNA
gcccaccgccccgcacccatt

SEQ ID NO: 7883 - RNA, 21 nt, synthetic construct
  source 1..21: mol_type = other RNA
gcccacgacccaaggagagcg

SEQ ID NO: 7884 - RNA, 21 nt, synthetic construct
  source 1..21: mol_type = other RNA
gcccactcgccgccaatcagc

SEQ ID NO: 7885 - RNA, 21 nt, synthetic construct
  source 1..21: mol_type = other RNA
gcccaggccccggcagcgcct

SEQ ID NO: 7886 - RNA, 21 nt, synthetic construct
  source 1..21: mol_type = other RNA
gccccacccagggggcaacgc

SEQ ID NO: 7887 - RNA, 21 nt, synthetic construct
  source 1..21: mol_type = other RNA
gccccaggggagggaagggtc

SEQ ID NO: 7888 - RNA, 21 nt, synthetic construct
  source 1..21: mol_type = other RNA
gccccagtcccgccagtccgc

SEQ ID NO: 7889 - RNA, 21 nt, synthetic construct
  source 1..21: mol_type = other RNA
gcccccagagcgatcagagtt

SEQ ID NO: 7890 - RNA, 21 nt, synthetic construct
  source 1..21: mol_type = other RNA
gccccccacccccacctcacg

SEQ ID NO: 7891 - RNA, 21 nt, synthetic construct
  source 1..21: mol_type = other RNA
gcccccctagccacccatccc

SEQ ID NO: 7892 - RNA, 21 nt, synthetic construct
  source 1..21: mol_type = other RNA
gcccccctctttccctggccc

SEQ ID NO: 7893 - RNA, 21 nt, synthetic construct
  source 1..21: mol_type = other RNA
gccccctcccgccgcgccatt

SEQ ID NO: 7894 - RNA, 21 nt, synthetic construct
  source 1..21: mol_type = other RNA
gccccctgggtggggcgggta

SEQ ID NO: 7895 - RNA, 21 nt, synthetic construct
  source 1..21: mol_type = other RNA
gccccgcacccattggcccac

SEQ ID NO: 7896 - RNA, 21 nt, synthetic construct
  source 1..21: mol_type = other RNA
gccccgcgcagtggtttcgct

SEQ ID NO: 7897 - RNA, 21 nt, synthetic construct
  source 1..21: mol_type = other RNA
gccccgcgcccctgcgcaacg

SEQ ID NO: 7898 - RNA, 21 nt, synthetic construct
  source 1..21: mol_type = other RNA
gccccggcagcgcctgggaca

SEQ ID NO: 7899 - RNA, 21 nt, synthetic construct
  source 1..21: mol_type = other RNA
gccccggcggcttccgctgat

SEQ ID NO: 7900 - RNA, 21 nt, synthetic construct
  source 1..21: mol_type = other RNA
gccccgggttcccaccgcctg

SEQ ID NO: 7901 - RNA, 21 nt, synthetic construct
  source 1..21: mol_type = other RNA
gcccctgcgcaacgtggcagg

SEQ ID NO: 7902 - RNA, 21 nt, synthetic construct
  source 1..21: mol_type = other RNA
gccccttctatgctaattgat

SEQ ID NO: 7903 - RNA, 21 nt, synthetic construct
  source 1..21: mol_type = other RNA
gcccgacctgctacaggcact

SEQ ID NO: 7904 - RNA, 21 nt, synthetic construct
  source 1..21: mol_type = other RNA
gcccgagcggaaacgccactg

SEQ ID NO: 7905 - RNA, 21 nt, synthetic construct
  source 1..21: mol_type = other RNA
gcccgatcgtgaggttcggtc

SEQ ID NO: 7906 - RNA, 21 nt, synthetic construct
  source 1..21: mol_type = other RNA
gcccgcacacccagcatctct

SEQ ID NO: 7907 - RNA, 21 nt, synthetic construct
  source 1..21: mol_type = other RNA
gcccgcctgcgctcagagact

SEQ ID NO: 7908 - RNA, 21 nt, synthetic construct
  source 1..21: mol_type = other RNA
gcccgcgccagagccgatttc

SEQ ID NO: 7909 - RNA, 21 nt, synthetic construct
  source 1..21: mol_type = other RNA
gcccgctgcccgagcggaaac

SEQ ID NO: 7910 - RNA, 21 nt, synthetic construct
  source 1..21: mol_type = other RNA
gcccggtcccacagcttcgac

SEQ ID NO: 7911 - RNA, 21 nt, synthetic construct
  source 1..21: mol_type = other RNA
gcccgtacccgtgaggtgggg

SEQ ID NO: 7912 - RNA, 21 nt, synthetic construct
  source 1..21: mol_type = other RNA
gccctccccaagctcttagga

SEQ ID NO: 7913 - RNA, 21 nt, synthetic construct
  source 1..21: mol_type = other RNA
gccctccgctcgaaatacaca

SEQ ID NO: 7914 - RNA, 21 nt, synthetic construct
  source 1..21: mol_type = other RNA
gccctgcggcaaccggagggg

SEQ ID NO: 7915 - RNA, 21 nt, synthetic construct
  source 1..21: mol_type = other RNA
gccctggttcaagtaggtaaa

SEQ ID NO: 7916 - RNA, 21 nt, synthetic construct
  source 1..21: mol_type = other RNA
gcccttcaggcggtgggaacc

SEQ ID NO: 7917 - RNA, 21 nt, synthetic construct
  source 1..21: mol_type = other RNA
gcccttgctactggctcgagt

SEQ ID NO: 7918 - RNA, 21 nt, synthetic construct
  source 1..21: mol_type = other RNA
gccgaagcacagcctcttctc

SEQ ID NO: 7919 - RNA, 21 nt, synthetic construct
  source 1..21: mol_type = other RNA
gccgagacttctggatggcgg

SEQ ID NO: 7920 - RNA, 21 nt, synthetic construct
  source 1..21: mol_type = other RNA
gccgaggctctctgaggagcc

SEQ ID NO: 7921 - RNA, 21 nt, synthetic construct
  source 1..21: mol_type = other RNA
gccgattggccgtttctcctc

SEQ ID NO: 7922 - RNA, 21 nt, synthetic construct
  source 1..21: mol_type = other RNA
gccgatttcactgaccctccc

SEQ ID NO: 7923 - RNA, 21 nt, synthetic construct
  source 1..21: mol_type = other RNA
gccgccaatcagcggaagccg

SEQ ID NO: 7924 - RNA, 21 nt, synthetic construct
  source 1..21: mol_type = other RNA
gccgccatccagaagtctcgg

SEQ ID NO: 7925 - RNA, 21 nt, synthetic construct
  source 1..21: mol_type = other RNA
gccgcccgcctgcgctcagag

SEQ ID NO: 7926 - RNA, 21 nt, synthetic construct
  source 1..21: mol_type = other RNA
gccgccgccatccagaagtct

SEQ ID NO: 7927 - RNA, 21 nt, synthetic construct
  source 1..21: mol_type = other RNA
gccgccgcccgcctgcgctca

SEQ ID NO: 7928 - RNA, 21 nt, synthetic construct
  source 1..21: mol_type = other RNA
gccgccggggccgcctagaga

SEQ ID NO: 7929 - RNA, 21 nt, synthetic construct
  source 1..21: mol_type = other RNA
gccgcctagagaagaggctgt

SEQ ID NO: 7930 - RNA, 21 nt, synthetic construct
  source 1..21: mol_type = other RNA
gccgcctgcttgtcttcgaca

SEQ ID NO: 7931 - RNA, 21 nt, synthetic construct
  source 1..21: mol_type = other RNA
gccgccttgcacacaccgttg

SEQ ID NO: 7932 - RNA, 21 nt, synthetic construct
  source 1..21: mol_type = other RNA
gccgcgagaacgggggtaggg

SEQ ID NO: 7933 - RNA, 21 nt, synthetic construct
  source 1..21: mol_type = other RNA
gccgcgatctcccctccgtaa

SEQ ID NO: 7934 - RNA, 21 nt, synthetic construct
  source 1..21: mol_type = other RNA
gccgcgccattggcctctccg

SEQ ID NO: 7935 - RNA, 21 nt, synthetic construct
  source 1..21: mol_type = other RNA
gccgcgcccgcacacccagca

SEQ ID NO: 7936 - RNA, 21 nt, synthetic construct
  source 1..21: mol_type = other RNA
gccgcggccgccgccatccag

SEQ ID NO: 7937 - RNA, 21 nt, synthetic construct
  source 1..21: mol_type = other RNA
gccgcgttgggcctaactcga

SEQ ID NO: 7938 - RNA, 21 nt, synthetic construct
  source 1..21: mol_type = other RNA
gccgcttagcgactctcgcgt

SEQ ID NO: 7939 - RNA, 21 nt, synthetic construct
  source 1..21: mol_type = other RNA
gccggaagcgctcctccctct

SEQ ID NO: 7940 - RNA, 21 nt, synthetic construct
  source 1..21: mol_type = other RNA
gccggagcgccgaagcacagc

SEQ ID NO: 7941 - RNA, 21 nt, synthetic construct
  source 1..21: mol_type = other RNA
gccggcactactgtgttggcg

SEQ ID NO: 7942 - RNA, 21 nt, synthetic construct
  source 1..21: mol_type = other RNA
gccggcccccctctttccctg

SEQ ID NO: 7943 - RNA, 21 nt, synthetic construct
  source 1..21: mol_type = other RNA
gccggccgagacttctggatg

SEQ ID NO: 7944 - RNA, 21 nt, synthetic construct
  source 1..21: mol_type = other RNA
gccggccgcgcccgcacaccc

SEQ ID NO: 7945 - RNA, 21 nt, synthetic construct
  source 1..21: mol_type = other RNA
gccggcgctgggaatccccgt

SEQ ID NO: 7946 - RNA, 21 nt, synthetic construct
  source 1..21: mol_type = other RNA
gccgggaatggcccgtacccg

SEQ ID NO: 7947 - RNA, 21 nt, synthetic construct
  source 1..21: mol_type = other RNA
gccggggccgcctagagaaga

SEQ ID NO: 7948 - RNA, 21 nt, synthetic construct
  source 1..21: mol_type = other RNA
gccgtcgggagtacgcagccg

SEQ ID NO: 7949 - RNA, 21 nt, synthetic construct
  source 1..21: mol_type = other RNA
gccgtctggtggcttgcgggg

SEQ ID NO: 7950 - RNA, 21 nt, synthetic construct
  source 1..21: mol_type = other RNA
gccgtggcgccgcgttgggcc

SEQ ID NO: 7951 - RNA, 21 nt, synthetic construct
  source 1..21: mol_type = other RNA
gccgtgtgtgaaaacacaaat

SEQ ID NO: 7952 - RNA, 21 nt, synthetic construct
  source 1..21: mol_type = other RNA
gccgtttctcctcccgccgtg

SEQ ID NO: 7953 - RNA, 21 nt, synthetic construct
  source 1..21: mol_type = other RNA
gcctaactcgagtcctgccgc

SEQ ID NO: 7954 - RNA, 21 nt, synthetic construct
  source 1..21: mol_type = other RNA
gcctactccacgtttaccttt

SEQ ID NO: 7955 - RNA, 21 nt, synthetic construct
  source 1..21: mol_type = other RNA
gcctagagaagaggctgtgct

SEQ ID NO: 7956 - RNA, 21 nt, synthetic construct
  source 1..21: mol_type = other RNA
gcctagattagagggggatct

SEQ ID NO: 7957 - RNA, 21 nt, synthetic construct
  source 1..21: mol_type = other RNA
gcctccagcgcgcgcttcctg

SEQ ID NO: 7958 - RNA, 21 nt, synthetic construct
  source 1..21: mol_type = other RNA
gcctccctcccgcctgcatcc

SEQ ID NO: 7959 - RNA, 21 nt, synthetic construct
  source 1..21: mol_type = other RNA
gcctcctgcggcgggagggga

SEQ ID NO: 7960 - RNA, 21 nt, synthetic construct
  source 1..21: mol_type = other RNA
gcctcggctaggtaggggagc

SEQ ID NO: 7961 - RNA, 21 nt, synthetic construct
  source 1..21: mol_type = other RNA
gcctcggggaggaccgtacca

SEQ ID NO: 7962 - RNA, 21 nt, synthetic construct
  source 1..21: mol_type = other RNA
gcctcgttgaatgtgtagggt

SEQ ID NO: 7963 - RNA, 21 nt, synthetic construct
  source 1..21: mol_type = other RNA
gcctctccgcccaccgccccg

SEQ ID NO: 7964 - RNA, 21 nt, synthetic construct
  source 1..21: mol_type = other RNA
gcctctcctcaagggaaaggt

SEQ ID NO: 7965 - RNA, 21 nt, synthetic construct
  source 1..21: mol_type = other RNA
gcctcttcaccccctttcctg

SEQ ID NO: 7966 - RNA, 21 nt, synthetic construct
  source 1..21: mol_type = other RNA
gcctcttctctaggcggcccc

SEQ ID NO: 7967 - RNA, 21 nt, synthetic construct
  source 1..21: mol_type = other RNA
gcctcttgctgccctccgctc

SEQ ID NO: 7968 - RNA, 21 nt, synthetic construct
  source 1..21: mol_type = other RNA
gcctcttgtcgccgattggcc

SEQ ID NO: 7969 - RNA, 21 nt, synthetic construct
  source 1..21: mol_type = other RNA
gcctgaagggcgagacaagcc

SEQ ID NO: 7970 - RNA, 21 nt, synthetic construct
  source 1..21: mol_type = other RNA
gcctgcatccagccacccctt

SEQ ID NO: 7971 - RNA, 21 nt, synthetic construct
  source 1..21: mol_type = other RNA
gcctgcgctcagagactcacg

SEQ ID NO: 7972 - RNA, 21 nt, synthetic construct
  source 1..21: mol_type = other RNA
gcctgcttgtcttcgacacct

SEQ ID NO: 7973 - RNA, 21 nt, synthetic construct
  source 1..21: mol_type = other RNA
gcctggagttgagccagattg

SEQ ID NO: 7974 - RNA, 21 nt, synthetic construct
  source 1..21: mol_type = other RNA
gcctggccctccccaagctct

SEQ ID NO: 7975 - RNA, 21 nt, synthetic construct
  source 1..21: mol_type = other RNA
gcctgggacaaggtaagggtc

SEQ ID NO: 7976 - RNA, 21 nt, synthetic construct
  source 1..21: mol_type = other RNA
gcctgtagcaggtcgggcttg

SEQ ID NO: 7977 - RNA, 21 nt, synthetic construct
  source 1..21: mol_type = other RNA
gcctgtgtatttcgagcggag

SEQ ID NO: 7978 - RNA, 21 nt, synthetic construct
  source 1..21: mol_type = other RNA
gccttccctctcgttttctgg

SEQ ID NO: 7979 - RNA, 21 nt, synthetic construct
  source 1..21: mol_type = other RNA
gccttgcacacaccgttgcaa

SEQ ID NO: 7980 - RNA, 21 nt, synthetic construct
  source 1..21: mol_type = other RNA
gccttgggcgtggagaacgat

SEQ ID NO: 7981 - RNA, 21 nt, synthetic construct
  source 1..21: mol_type = other RNA
gccttgtgacagacaactctg

SEQ ID NO: 7982 - RNA, 21 nt, synthetic construct
  source 1..21: mol_type = other RNA
gcctttcccgtgggaagtcgg

SEQ ID NO: 7983 - RNA, 21 nt, synthetic construct
  source 1..21: mol_type = other RNA
gcctttctgccccccaccccc

SEQ ID NO: 7984 - RNA, 21 nt, synthetic construct
  source 1..21: mol_type = other RNA
gcctttgaagatattctcaca

SEQ ID NO: 7985 - RNA, 21 nt, synthetic construct
  source 1..21: mol_type = other RNA
gcctttggctcgctccgcctt

SEQ ID NO: 7986 - RNA, 21 nt, synthetic construct
  source 1..21: mol_type = other RNA
gcctttgggaagcagccatct

SEQ ID NO: 7987 - RNA, 21 nt, synthetic construct
  source 1..21: mol_type = other RNA
gcgaaaccactgcgcggggcg

SEQ ID NO: 7988 - RNA, 21 nt, synthetic construct
  source 1..21: mol_type = other RNA
gcgaaggtaatgcctttggga

SEQ ID NO: 7989 - RNA, 21 nt, synthetic construct
  source 1..21: mol_type = other RNA
gcgacaagaggctagccggaa

SEQ ID NO: 7990 - RNA, 21 nt, synthetic construct
  source 1..21: mol_type = other RNA
gcgacccaactccccctttca

SEQ ID NO: 7991 - RNA, 21 nt, synthetic construct
  source 1..21: mol_type = other RNA
gcgactctcgcgttgccccct

SEQ ID NO: 7992 - RNA, 21 nt, synthetic construct
  source 1..21: mol_type = other RNA
gcgagaacgggggtagggagt

SEQ ID NO: 7993 - RNA, 21 nt, synthetic construct
  source 1..21: mol_type = other RNA
gcgagacaagcccgacctgct

SEQ ID NO: 7994 - RNA, 21 nt, synthetic construct
  source 1..21: mol_type = other RNA
gcgagagcaatggctccgtcc

SEQ ID NO: 7995 - RNA, 21 nt, synthetic construct
  source 1..21: mol_type = other RNA
gcgagagtcgctaagcggctg

SEQ ID NO: 7996 - RNA, 21 nt, synthetic construct
  source 1..21: mol_type = other RNA
gcgagcgcggggagacggagg

SEQ ID NO: 7997 - RNA, 21 nt, synthetic construct
  source 1..21: mol_type = other RNA
gcgaggggggtgagaagtggc

SEQ ID NO: 7998 - RNA, 21 nt, synthetic construct
  source 1..21: mol_type = other RNA
gcgagtgggccaatgggtgcg

SEQ ID NO: 7999 - RNA, 21 nt, synthetic construct
  source 1..21: mol_type = other RNA
gcgatcagagttgtctgtcac

SEQ ID NO: 8000 - RNA, 21 nt, synthetic construct
  source 1..21: mol_type = other RNA
gcgatctcccctccgtaatct

SEQ ID NO: 8001 - RNA, 21 nt, synthetic construct
  source 1..21: mol_type = other RNA
gcgatttacctacttgaacca

SEQ ID NO: 8002 - RNA, 21 nt, synthetic construct
  source 1..21: mol_type = other RNA
gcgcaacgtggcaggaagcgc

SEQ ID NO: 8003 - RNA, 21 nt, synthetic construct
  source 1..21: mol_type = other RNA
gcgcacggcactcccgggagg

SEQ ID NO: 8004 - RNA, 21 nt, synthetic construct
  source 1..21: mol_type = other RNA
gcgcagtggtttcgctcatgt

SEQ ID NO: 8005 - RNA, 21 nt, synthetic construct
  source 1..21: mol_type = other RNA
gcgccacggcgtttcctggcc

SEQ ID NO: 8006 - RNA, 21 nt, synthetic construct
  source 1..21: mol_type = other RNA
gcgccagagccgatttcactg

SEQ ID NO: 8007 - RNA, 21 nt, synthetic construct
  source 1..21: mol_type = other RNA
gcgccattggcctctccgccc

SEQ ID NO: 8008 - RNA, 21 nt, synthetic construct
  source 1..21: mol_type = other RNA
gcgccccgcgcagtggtttcg

SEQ ID NO: 8009 - RNA, 21 nt, synthetic construct
  source 1..21: mol_type = other RNA
gcgcccctgcgcaacgtggca

SEQ ID NO: 8010 - RNA, 21 nt, synthetic construct
  source 1..21: mol_type = other RNA
gcgcccgcacacccagcatct

SEQ ID NO: 8011 - RNA, 21 nt, synthetic construct
  source 1..21: mol_type = other RNA
gcgccgaagcacagcctcttc

SEQ ID NO: 8012 - RNA, 21 nt, synthetic construct
  source 1..21: mol_type = other RNA
gcgccgcgttgggcctaactc

SEQ ID NO: 8013 - RNA, 21 nt, synthetic construct
  source 1..21: mol_type = other RNA
gcgccggcgctgggaatcccc

SEQ ID NO: 8014 - RNA, 21 nt, synthetic construct
  source 1..21: mol_type = other RNA
gcgcctgggacaaggtaaggg

SEQ ID NO: 8015 - RNA, 21 nt, synthetic construct
  source 1..21: mol_type = other RNA
gcgcgcgcttcctgccacgtt

SEQ ID NO: 8016 - RNA, 21 nt, synthetic construct
  source 1..21: mol_type = other RNA
gcgcgcttcctgccacgttgc

SEQ ID NO: 8017 - RNA, 21 nt, synthetic construct
  source 1..21: mol_type = other RNA
gcgcgggcgtcctcccaccct

SEQ ID NO: 8018 - RNA, 21 nt, synthetic construct
  source 1..21: mol_type = other RNA
gcgcggggagacggaggaggt

SEQ ID NO: 8019 - RNA, 21 nt, synthetic construct
  source 1..21: mol_type = other RNA
gcgctcagagactcacgcagc

SEQ ID NO: 8020 - RNA, 21 nt, synthetic construct
  source 1..21: mol_type = other RNA
gcgctccggctcctcagagag

SEQ ID NO: 8021 - RNA, 21 nt, synthetic construct
  source 1..21: mol_type = other RNA
gcgctcctccctctgcgagag

SEQ ID NO: 8022 - RNA, 21 nt, synthetic construct
  source 1..21: mol_type = other RNA
gcgctcgctctccttgggtcg

SEQ ID NO: 8023 - RNA, 21 nt, synthetic construct
  source 1..21: mol_type = other RNA
gcgctcggcctcggggaggac

SEQ ID NO: 8024 - RNA, 21 nt, synthetic construct
  source 1..21: mol_type = other RNA
gcgctgggaatccccgtgcgg

SEQ ID NO: 8025 - RNA, 21 nt, synthetic construct
  source 1..21: mol_type = other RNA
gcgcttccggctagcctcttg

SEQ ID NO: 8026 - RNA, 21 nt, synthetic construct
  source 1..21: mol_type = other RNA
gcgcttcctgccacgttgcgc

SEQ ID NO: 8027 - RNA, 21 nt, synthetic construct
  source 1..21: mol_type = other RNA
gcggaaaatgctcgaaaccgg

SEQ ID NO: 8028 - RNA, 21 nt, synthetic construct
  source 1..21: mol_type = other RNA
gcggaaacgccactgaccgca

SEQ ID NO: 8029 - RNA, 21 nt, synthetic construct
  source 1..21: mol_type = other RNA
gcggaactctggtgggagggg

SEQ ID NO: 8030 - RNA, 21 nt, synthetic construct
  source 1..21: mol_type = other RNA
gcggaagccgccggggccgcc

SEQ ID NO: 8031 - RNA, 21 nt, synthetic construct
  source 1..21: mol_type = other RNA
gcggactggcgggactggggc

SEQ ID NO: 8032 - RNA, 21 nt, synthetic construct
  source 1..21: mol_type = other RNA
gcggagaggccaatggcgcgg

SEQ ID NO: 8033 - RNA, 21 nt, synthetic construct
  source 1..21: mol_type = other RNA
gcggagccgcggccgccgcca

SEQ ID NO: 8034 - RNA, 21 nt, synthetic construct
  source 1..21: mol_type = other RNA
gcggagcgagccaaaggcggg

SEQ ID NO: 8035 - RNA, 21 nt, synthetic construct
  source 1..21: mol_type = other RNA
gcggagggcagcaagaggcct

SEQ ID NO: 8036 - RNA, 21 nt, synthetic construct
  source 1..21: mol_type = other RNA
gcggcaaccggagggggaggg

SEQ ID NO: 8037 - RNA, 21 nt, synthetic construct
  source 1..21: mol_type = other RNA
gcggcagctcactcagcccgc

SEQ ID NO: 8038 - RNA, 21 nt, synthetic construct
  source 1..21: mol_type = other RNA
gcggcaggactcgagttaggc

SEQ ID NO: 8039 - RNA, 21 nt, synthetic construct
  source 1..21: mol_type = other RNA
gcggcccccagagcgatcaga

SEQ ID NO: 8040 - RNA, 21 nt, synthetic construct
  source 1..21: mol_type = other RNA
gcggccccggcggcttccgct

SEQ ID NO: 8041 - RNA, 21 nt, synthetic construct
  source 1..21: mol_type = other RNA
gcggccgccgccatccagaag

SEQ ID NO: 8042 - RNA, 21 nt, synthetic construct
  source 1..21: mol_type = other RNA
gcggccttgtgacagacaact

SEQ ID NO: 8043 - RNA, 21 nt, synthetic construct
  source 1..21: mol_type = other RNA
gcggcgaggggggtgagaagt

SEQ ID NO: 8044 - RNA, 21 nt, synthetic construct
  source 1..21: mol_type = other RNA
gcggcgagtgggccaatgggt

SEQ ID NO: 8045 - RNA, 21 nt, synthetic construct
  source 1..21: mol_type = other RNA
gcggcgccacggcgtttcctg

SEQ ID NO: 8046 - RNA, 21 nt, synthetic construct
  source 1..21: mol_type = other RNA
gcggcgctcggcctcggggag

SEQ ID NO: 8047 - RNA, 21 nt, synthetic construct
  source 1..21: mol_type = other RNA
gcggcggcagctcactcagcc

SEQ ID NO: 8048 - RNA, 21 nt, synthetic construct
  source 1..21: mol_type = other RNA
gcggcggcggcagctcactca

SEQ ID NO: 8049 - RNA, 21 nt, synthetic construct
  source 1..21: mol_type = other RNA
gcggcgggaggggagggtcag

SEQ ID NO: 8050 - RNA, 21 nt, synthetic construct
  source 1..21: mol_type = other RNA
gcggcgggtaaaccgactccc

SEQ ID NO: 8051 - RNA, 21 nt, synthetic construct
  source 1..21: mol_type = other RNA
gcggctgcgtactcccgacgg

SEQ ID NO: 8052 - RNA, 21 nt, synthetic construct
  source 1..21: mol_type = other RNA
gcggcttccgctgattggcgg

SEQ ID NO: 8053 - RNA, 21 nt, synthetic construct
  source 1..21: mol_type = other RNA
gcgggactggggctgcgtgag

SEQ ID NO: 8054 - RNA, 21 nt, synthetic construct
  source 1..21: mol_type = other RNA
gcgggaggagaaacggccaat

SEQ ID NO: 8055 - RNA, 21 nt, synthetic construct
  source 1..21: mol_type = other RNA
gcgggaggggagggtcagtga

SEQ ID NO: 8056 - RNA, 21 nt, synthetic construct
  source 1..21: mol_type = other RNA
gcgggcctccctcccgcctgc

SEQ ID NO: 8057 - RNA, 21 nt, synthetic construct
  source 1..21: mol_type = other RNA
gcgggcgtcctcccaccctcc

SEQ ID NO: 8058 - RNA, 21 nt, synthetic construct
  source 1..21: mol_type = other RNA
gcgggcgttggtacggtcctc

SEQ ID NO: 8059 - RNA, 21 nt, synthetic construct
  source 1..21: mol_type = other RNA
gcgggctgccggccgagactt

SEQ ID NO: 8060 - RNA, 21 nt, synthetic construct
  source 1..21: mol_type = other RNA
gcggggagacggaggaggtga

SEQ ID NO: 8061 - RNA, 21 nt, synthetic construct
  source 1..21: mol_type = other RNA
gcggggaggcgggcgttggta

SEQ ID NO: 8062 - RNA, 21 nt, synthetic construct
  source 1..21: mol_type = other RNA
gcggggccagacactgcggcg

SEQ ID NO: 8063 - RNA, 21 nt, synthetic construct
  source 1..21: mol_type = other RNA
gcggggcggtgggcggagagg

SEQ ID NO: 8064 - RNA, 21 nt, synthetic construct
  source 1..21: mol_type = other RNA
gcgggggcgggctgccggccg

SEQ ID NO: 8065 - RNA, 21 nt, synthetic construct
  source 1..21: mol_type = other RNA
gcgggggttgcctttcccgtg

SEQ ID NO: 8066 - RNA, 21 nt, synthetic construct
  source 1..21: mol_type = other RNA
gcgggtaaaccgactcccccg

SEQ ID NO: 8067 - RNA, 21 nt, synthetic construct
  source 1..21: mol_type = other RNA
gcgggtaggtaggtggggtgt

SEQ ID NO: 8068 - RNA, 21 nt, synthetic construct
  source 1..21: mol_type = other RNA
gcggtacactggggggatggg

SEQ ID NO: 8069 - RNA, 21 nt, synthetic construct
  source 1..21: mol_type = other RNA
gcggtcagtggcgtttccgct

SEQ ID NO: 8070 - RNA, 21 nt, synthetic construct
  source 1..21: mol_type = other RNA
gcggtgggcggagaggccaat

SEQ ID NO: 8071 - RNA, 21 nt, synthetic construct
  source 1..21: mol_type = other RNA
gcgtaactgacaggagcttta

SEQ ID NO: 8072 - RNA, 21 nt, synthetic construct
  source 1..21: mol_type = other RNA
gcgtactcccgacggcgtaac

SEQ ID NO: 8073 - RNA, 21 nt, synthetic construct
  source 1..21: mol_type = other RNA
gcgtattctggttggagtaaa

SEQ ID NO: 8074 - RNA, 21 nt, synthetic construct
  source 1..21: mol_type = other RNA
gcgtcagtggtctttctcttg

SEQ ID NO: 8075 - RNA, 21 nt, synthetic construct
  source 1..21: mol_type = other RNA
gcgtccaggaagattacggag

SEQ ID NO: 8076 - RNA, 21 nt, synthetic construct
  source 1..21: mol_type = other RNA
gcgtcctcccaccctcccctt

SEQ ID NO: 8077 - RNA, 21 nt, synthetic construct
  source 1..21: mol_type = other RNA
gcgtcctgacccaggaaaaac

SEQ ID NO: 8078 - RNA, 21 nt, synthetic construct
  source 1..21: mol_type = other RNA
gcgtgagtctctgagcgcagg

SEQ ID NO: 8079 - RNA, 21 nt, synthetic construct
  source 1..21: mol_type = other RNA
gcgtggagaacgatcttgtga

SEQ ID NO: 8080 - RNA, 21 nt, synthetic construct
  source 1..21: mol_type = other RNA
gcgtgtaagtcgggaatgtga

SEQ ID NO: 8081 - RNA, 21 nt, synthetic construct
  source 1..21: mol_type = other RNA
gcgtgtctgagatagcctcgt

SEQ ID NO: 8082 - RNA, 21 nt, synthetic construct
  source 1..21: mol_type = other RNA
gcgtgtgccacagcgtgtctg

SEQ ID NO: 8083 - RNA, 21 nt, synthetic construct
  source 1..21: mol_type = other RNA
gcgttgccccctgggtggggc

SEQ ID NO: 8084 - RNA, 21 nt, synthetic construct
  source 1..21: mol_type = other RNA
gcgttgggcctaactcgagtc

SEQ ID NO: 8085 - RNA, 21 nt, synthetic construct
  source 1..21: mol_type = other RNA
gcgttgggggaggggaagcgt

SEQ ID NO: 8086 - RNA, 21 nt, synthetic construct
  source 1..21: mol_type = other RNA
gcgttggtacggtcctccccg

SEQ ID NO: 8087 - RNA, 21 nt, synthetic construct
  source 1..21: mol_type = other RNA
gcgtttccgctcgggcagcgg

SEQ ID NO: 8088 - RNA, 21 nt, synthetic construct
  source 1..21: mol_type = other RNA
gcgtttcctggccgggaatgg

SEQ ID NO: 8089 - RNA, 21 nt, synthetic construct
  source 1..21: mol_type = other RNA
gctaagcggctgcgtactccc

SEQ ID NO: 8090 - RNA, 21 nt, synthetic construct
  source 1..21: mol_type = other RNA
gctaattgattctatagagtc

SEQ ID NO: 8091 - RNA, 21 nt, synthetic construct
  source 1..21: mol_type = other RNA
gctacaggcactcgtgggggt

SEQ ID NO: 8092 - RNA, 21 nt, synthetic construct
  source 1..21: mol_type = other RNA
gctactggctcgagtctcaca

SEQ ID NO: 8093 - RNA, 21 nt, synthetic construct
  source 1..21: mol_type = other RNA
gctagccggaagcgctcctcc

SEQ ID NO: 8094 - RNA, 21 nt, synthetic construct
  source 1..21: mol_type = other RNA
gctagcctcttgtcgccgatt

SEQ ID NO: 8095 - RNA, 21 nt, synthetic construct
  source 1..21: mol_type = other RNA
gctaggggggccgtctggtgg

SEQ ID NO: 8096 - RNA, 21 nt, synthetic construct
  source 1..21: mol_type = other RNA
gctaggtaggggagcggaact

SEQ ID NO: 8097 - RNA, 21 nt, synthetic construct
  source 1..21: mol_type = other RNA
gctatctcagacacgctgtgg

SEQ ID NO: 8098 - RNA, 21 nt, synthetic construct
  source 1..21: mol_type = other RNA
gctcaactccaggctcgaacc

SEQ ID NO: 8099 - RNA, 21 nt, synthetic construct
  source 1..21: mol_type = other RNA
gctcactcagcccgctgcccg

SEQ ID NO: 8100 - RNA, 21 nt, synthetic construct
  source 1..21: mol_type = other RNA
gctcagagactcacgcagccc

SEQ ID NO: 8101 - RNA, 21 nt, synthetic construct
  source 1..21: mol_type = other RNA
gctcatgtgagactcgagcca

SEQ ID NO: 8102 - RNA, 21 nt, synthetic construct
  source 1..21: mol_type = other RNA
gctccccgtggcgtgtgccac

SEQ ID NO: 8103 - RNA, 21 nt, synthetic construct
  source 1..21: mol_type = other RNA
gctcccctacctagccgaggc

SEQ ID NO: 8104 - RNA, 21 nt, synthetic construct
  source 1..21: mol_type = other RNA
gctcccttctccctccccctc

SEQ ID NO: 8105 - RNA, 21 nt, synthetic construct
  source 1..21: mol_type = other RNA
gctccgccccgggttcccacc

SEQ ID NO: 8106 - RNA, 21 nt, synthetic construct
  source 1..21: mol_type = other RNA
gctccgcctttctgcccccca

SEQ ID NO: 8107 - RNA, 21 nt, synthetic construct
  source 1..21: mol_type = other RNA
gctccggctcctcagagagcc

SEQ ID NO: 8108 - RNA, 21 nt, synthetic construct
  source 1..21: mol_type = other RNA
gctccgtccggtttcgagcat

SEQ ID NO: 8109 - RNA, 21 nt, synthetic construct
  source 1..21: mol_type = other RNA
gctcctcagagagcctcggct

SEQ ID NO: 8110 - RNA, 21 nt, synthetic construct
  source 1..21: mol_type = other RNA
gctcctcccccacccccacga

SEQ ID NO: 8111 - RNA, 21 nt, synthetic construct
  source 1..21: mol_type = other RNA
gctcctccctctgcgagagca

SEQ ID NO: 8112 - RNA, 21 nt, synthetic construct
  source 1..21: mol_type = other RNA
gctcctgtcagttacgccgtc

SEQ ID NO: 8113 - RNA, 21 nt, synthetic construct
  source 1..21: mol_type = other RNA
gctcgaaaccggacggagcca

SEQ ID NO: 8114 - RNA, 21 nt, synthetic construct
  source 1..21: mol_type = other RNA
gctcgaaccctacacattcaa

SEQ ID NO: 8115 - RNA, 21 nt, synthetic construct
  source 1..21: mol_type = other RNA
gctcgagtctcacatgagcga

SEQ ID NO: 8116 - RNA, 21 nt, synthetic construct
  source 1..21: mol_type = other RNA
gctcgctccgcctttctgccc

SEQ ID NO: 8117 - RNA, 21 nt, synthetic construct
  source 1..21: mol_type = other RNA
gctcgctctccttgggtcgtg

SEQ ID NO: 8118 - RNA, 21 nt, synthetic construct
  source 1..21: mol_type = other RNA
gctcggcctcggggaggaccg

SEQ ID NO: 8119 - RNA, 21 nt, synthetic construct
  source 1..21: mol_type = other RNA
gctcgggcagcgggctgagtg

SEQ ID NO: 8120 - RNA, 21 nt, synthetic construct
  source 1..21: mol_type = other RNA
gctctccttgggtcgtgggcc

SEQ ID NO: 8121 - RNA, 21 nt, synthetic construct
  source 1..21: mol_type = other RNA
gctctcgcagagggaggagcg

SEQ ID NO: 8122 - RNA, 21 nt, synthetic construct
  source 1..21: mol_type = other RNA
gctctctgaggagccggagcg

SEQ ID NO: 8123 - RNA, 21 nt, synthetic construct
  source 1..21: mol_type = other RNA
gctctggcgcgggcgtcctcc

SEQ ID NO: 8124 - RNA, 21 nt, synthetic construct
  source 1..21: mol_type = other RNA
gctctgggggccgcgatctcc

SEQ ID NO: 8125 - RNA, 21 nt, synthetic construct
  source 1..21: mol_type = other RNA
gctcttaggaggatgctgcca

SEQ ID NO: 8126 - RNA, 21 nt, synthetic construct
  source 1..21: mol_type = other RNA
gctctttcctacactcctctt

SEQ ID NO: 8127 - RNA, 21 nt, synthetic construct
  source 1..21: mol_type = other RNA
gctgattggcggcgagtgggc

SEQ ID NO: 8128 - RNA, 21 nt, synthetic construct
  source 1..21: mol_type = other RNA
gctgccacttctcacccccct

SEQ ID NO: 8129 - RNA, 21 nt, synthetic construct
  source 1..21: mol_type = other RNA
gctgcccgagcggaaacgcca

SEQ ID NO: 8130 - RNA, 21 nt, synthetic construct
  source 1..21: mol_type = other RNA
gctgccctccgctcgaaatac

SEQ ID NO: 8131 - RNA, 21 nt, synthetic construct
  source 1..21: mol_type = other RNA
gctgccggccgagacttctgg

SEQ ID NO: 8132 - RNA, 21 nt, synthetic construct
  source 1..21: mol_type = other RNA
gctgcgtactcccgacggcgt

SEQ ID NO: 8133 - RNA, 21 nt, synthetic construct
  source 1..21: mol_type = other RNA
gctgcgtgagtctctgagcgc

SEQ ID NO: 8134 - RNA, 21 nt, synthetic construct
  source 1..21: mol_type = other RNA
gctgcttcccaaaggcattac

SEQ ID NO: 8135 - RNA, 21 nt, synthetic construct
  source 1..21: mol_type = other RNA
gctggatgcaggcgggaggga

SEQ ID NO: 8136 - RNA, 21 nt, synthetic construct
  source 1..21: mol_type = other RNA
gctgggaatccccgtgcggtc

SEQ ID NO: 8137 - RNA, 21 nt, synthetic construct
  source 1..21: mol_type = other RNA
gctgtcgaagctgtgggaccg

SEQ ID NO: 8138 - RNA, 21 nt, synthetic construct
  source 1..21: mol_type = other RNA
gctgtgcttcggcgctccggc

SEQ ID NO: 8139 - RNA, 21 nt, synthetic construct
  source 1..21: mol_type = other RNA
gctgtggcacacgccacgggg

SEQ ID NO: 8140 - RNA, 21 nt, synthetic construct
  source 1..21: mol_type = other RNA
gctgtgggaccgggcccttgc

SEQ ID NO: 8141 - RNA, 21 nt, synthetic construct
  source 1..21: mol_type = other RNA
gcttagcgactctcgcgttgc

SEQ ID NO: 8142 - RNA, 21 nt, synthetic construct
  source 1..21: mol_type = other RNA
gcttcccaaaggcattacctt

SEQ ID NO: 8143 - RNA, 21 nt, synthetic construct
  source 1..21: mol_type = other RNA
gcttcccacctcagatggctg

SEQ ID NO: 8144 - RNA, 21 nt, synthetic construct
  source 1..21: mol_type = other RNA
gcttcccctcccccaacgcct

SEQ ID NO: 8145 - RNA, 21 nt, synthetic construct
  source 1..21: mol_type = other RNA
gcttccgctgattggcggcga

SEQ ID NO: 8146 - RNA, 21 nt, synthetic construct
  source 1..21: mol_type = other RNA
gcttccggctagcctcttgtc

SEQ ID NO: 8147 - RNA, 21 nt, synthetic construct
  source 1..21: mol_type = other RNA
gcttcctgccacgttgcgcag

SEQ ID NO: 8148 - RNA, 21 nt, synthetic construct
  source 1..21: mol_type = other RNA
gcttcgacagccaatcaggtg

SEQ ID NO: 8149 - RNA, 21 nt, synthetic construct
  source 1..21: mol_type = other RNA
gcttcggcgctccggctcctc

SEQ ID NO: 8150 - RNA, 21 nt, synthetic construct
  source 1..21: mol_type = other RNA
gcttgcgggggttgcctttcc

SEQ ID NO: 8151 - RNA, 21 nt, synthetic construct
  source 1..21: mol_type = other RNA
gcttggggagggccaggccca

SEQ ID NO: 8152 - RNA, 21 nt, synthetic construct
  source 1..21: mol_type = other RNA
gcttgtctcacttcttgggcg

SEQ ID NO: 8153 - RNA, 21 nt, synthetic construct
  source 1..21: mol_type = other RNA
gcttgtctcgcccttcaggcg

SEQ ID NO: 8154 - RNA, 21 nt, synthetic construct
  source 1..21: mol_type = other RNA
gcttgtcttcgacacctgatt

SEQ ID NO: 8155 - RNA, 21 nt, synthetic construct
  source 1..21: mol_type = other RNA
gctttactccaaccagaatac

SEQ ID NO: 8156 - RNA, 21 nt, synthetic construct
  source 1..21: mol_type = other RNA
gctttcccaacagtttaactt

SEQ ID NO: 8157 - RNA, 21 nt, synthetic construct
  source 1..21: mol_type = other RNA
ggaaaaacatgaaagggggag

SEQ ID NO: 8158 - RNA, 21 nt, synthetic construct
  source 1..21: mol_type = other RNA
ggaaaatgctcgaaaccggac

SEQ ID NO: 8159 - RNA, 21 nt, synthetic construct
  source 1..21: mol_type = other RNA
ggaaaatggggtgttgcaacg

SEQ ID NO: 8160 - RNA, 21 nt, synthetic construct
  source 1..21: mol_type = other RNA
ggaaacgccactgaccgcacg

SEQ ID NO: 8161 - RNA, 21 nt, synthetic construct
  source 1..21: mol_type = other RNA
ggaaacgccgtggcgccgcgt

SEQ ID NO: 8162 - RNA, 21 nt, synthetic construct
  source 1..21: mol_type = other RNA
ggaaagagaattcataaaggg

SEQ ID NO: 8163 - RNA, 21 nt, synthetic construct
  source 1..21: mol_type = other RNA
ggaaagagccctggttcaagt

SEQ ID NO: 8164 - RNA, 21 nt, synthetic construct
  source 1..21: mol_type = other RNA
ggaaagaggggggccggcact

SEQ ID NO: 8165 - RNA, 21 nt, synthetic construct
  source 1..21: mol_type = other RNA
ggaaagccccttctatgctaa

SEQ ID NO: 8166 - RNA, 21 nt, synthetic construct
  source 1..21: mol_type = other RNA
ggaaaggcaacccccgcaagc

SEQ ID NO: 8167 - RNA, 21 nt, synthetic construct
  source 1..21: mol_type = other RNA
ggaaagggggtgaagaggcgt

SEQ ID NO: 8168 - RNA, 21 nt, synthetic construct
  source 1..21: mol_type = other RNA
ggaaaggggtggctggatgca

SEQ ID NO: 8169 - RNA, 21 nt, synthetic construct
  source 1..21: mol_type = other RNA
ggaaaggtaaacgtggagtag

SEQ ID NO: 8170 - RNA, 21 nt, synthetic construct
  source 1..21: mol_type = other RNA
ggaaagttaaactgttgggaa

SEQ ID NO: 8171 - RNA, 21 nt, synthetic construct
  source 1..21: mol_type = other RNA
ggaacataatgtttgttacgt

SEQ ID NO: 8172 - RNA, 21 nt, synthetic construct
  source 1..21: mol_type = other RNA
ggaactctggtgggaggggag

SEQ ID NO: 8173 - RNA, 21 nt, synthetic construct
  source 1..21: mol_type = other RNA
ggaactgcctactccacgttt

SEQ ID NO: 8174 - RNA, 21 nt, synthetic construct
  source 1..21: mol_type = other RNA
ggaagattacggaggggagat

SEQ ID NO: 8175 - RNA, 21 nt, synthetic construct
  source 1..21: mol_type = other RNA
ggaagcagccatctgaggtgg

SEQ ID NO: 8176 - RNA, 21 nt, synthetic construct
  source 1..21: mol_type = other RNA
ggaagccagaaaacgagaggg

SEQ ID NO: 8177 - RNA, 21 nt, synthetic construct
  source 1..21: mol_type = other RNA
ggaagccgccggggccgccta

SEQ ID NO: 8178 - RNA, 21 nt, synthetic construct
  source 1..21: mol_type = other RNA
ggaagcgctcctccctctgcg

SEQ ID NO: 8179 - RNA, 21 nt, synthetic construct
  source 1..21: mol_type = other RNA
ggaagcgtcctgacccaggaa

SEQ ID NO: 8180 - RNA, 21 nt, synthetic construct
  source 1..21: mol_type = other RNA
ggaaggcgtccaggaagatta

SEQ ID NO: 8181 - RNA, 21 nt, synthetic construct
  source 1..21: mol_type = other RNA
ggaaggggagggtgggaggac

SEQ ID NO: 8182 - RNA, 21 nt, synthetic construct
  source 1..21: mol_type = other RNA
ggaagggtcacctcctccgtc

SEQ ID NO: 8183 - RNA, 21 nt, synthetic construct
  source 1..21: mol_type = other RNA
ggaagtcgggaacataatgtt

SEQ ID NO: 8184 - RNA, 21 nt, synthetic construct
  source 1..21: mol_type = other RNA
ggaatatttttctgcctttga

SEQ ID NO: 8185 - RNA, 21 nt, synthetic construct
  source 1..21: mol_type = other RNA
ggaatccccgtgcggtcagtg

SEQ ID NO: 8186 - RNA, 21 nt, synthetic construct
  source 1..21: mol_type = other RNA
ggaatggcccgtacccgtgag

SEQ ID NO: 8187 - RNA, 21 nt, synthetic construct
  source 1..21: mol_type = other RNA
ggaatgtgaagaggagtgtag

SEQ ID NO: 8188 - RNA, 21 nt, synthetic construct
  source 1..21: mol_type = other RNA
ggacaaggtaagggtccgaca

SEQ ID NO: 8189 - RNA, 21 nt, synthetic construct
  source 1..21: mol_type = other RNA
ggacacgccccctcccgccgc

SEQ ID NO: 8190 - RNA, 21 nt, synthetic construct
  source 1..21: mol_type = other RNA
ggacccttaccttgtcccagg

SEQ ID NO: 8191 - RNA, 21 nt, synthetic construct
  source 1..21: mol_type = other RNA
ggaccgggcccttgctactgg

SEQ ID NO: 8192 - RNA, 21 nt, synthetic construct
  source 1..21: mol_type = other RNA
ggaccgtaccaacgcccgcct

SEQ ID NO: 8193 - RNA, 21 nt, synthetic construct
  source 1..21: mol_type = other RNA
ggacgcccgcgccagagccga

SEQ ID NO: 8194 - RNA, 21 nt, synthetic construct
  source 1..21: mol_type = other RNA
ggacgccttccctctcgtttt

SEQ ID NO: 8195 - RNA, 21 nt, synthetic construct
  source 1..21: mol_type = other RNA
ggacgcttcccctcccccaac

SEQ ID NO: 8196 - RNA, 21 nt, synthetic construct
  source 1..21: mol_type = other RNA
ggacggagccattgctctcgc

SEQ ID NO: 8197 - RNA, 21 nt, synthetic construct
  source 1..21: mol_type = other RNA
ggactcgagttaggcccaacg

SEQ ID NO: 8198 - RNA, 21 nt, synthetic construct
  source 1..21: mol_type = other RNA
ggactctatagaatcaattag

SEQ ID NO: 8199 - RNA, 21 nt, synthetic construct
  source 1..21: mol_type = other RNA
ggactggcgggactggggctg

SEQ ID NO: 8200 - RNA, 21 nt, synthetic construct
  source 1..21: mol_type = other RNA
ggactggggctgcgtgagtct

SEQ ID NO: 8201 - RNA, 21 nt, synthetic construct
  source 1..21: mol_type = other RNA
ggagaaacggccaatcggcga

SEQ ID NO: 8202 - RNA, 21 nt, synthetic construct
  source 1..21: mol_type = other RNA
ggagaacgatcttgtgagaat

SEQ ID NO: 8203 - RNA, 21 nt, synthetic construct
  source 1..21: mol_type = other RNA
ggagaagggagcggaaaatgc

SEQ ID NO: 8204 - RNA, 21 nt, synthetic construct
  source 1..21: mol_type = other RNA
ggagacggaggaggtgaccct

SEQ ID NO: 8205 - RNA, 21 nt, synthetic construct
  source 1..21: mol_type = other RNA
ggagagagatccccctctaat

SEQ ID NO: 8206 - RNA, 21 nt, synthetic construct
  source 1..21: mol_type = other RNA
ggagagcgagcgcggggagac

SEQ ID NO: 8207 - RNA, 21 nt, synthetic construct
  source 1..21: mol_type = other RNA
ggagaggccaatggcgcggcg

SEQ ID NO: 8208 - RNA, 21 nt, synthetic construct
  source 1..21: mol_type = other RNA
ggagaggcctcttgctgccct

SEQ ID NO: 8209 - RNA, 21 nt, synthetic construct
  source 1..21: mol_type = other RNA
ggagatcgcggcccccagagc

SEQ ID NO: 8210 - RNA, 21 nt, synthetic construct
  source 1..21: mol_type = other RNA
ggagccagagaacgtgtggtg

SEQ ID NO: 8211 - RNA, 21 nt, synthetic construct
  source 1..21: mol_type = other RNA
ggagccattgctctcgcagag

SEQ ID NO: 8212 - RNA, 21 nt, synthetic construct
  source 1..21: mol_type = other RNA
ggagccgcggccgccgccatc

SEQ ID NO: 8213 - RNA, 21 nt, synthetic construct
  source 1..21: mol_type = other RNA
ggagccggagcgccgaagcac

SEQ ID NO: 8214 - RNA, 21 nt, synthetic construct
  source 1..21: mol_type = other RNA
ggagcgccgaagcacagcctc

SEQ ID NO: 8215 - RNA, 21 nt, synthetic construct
  source 1..21: mol_type = other RNA
ggagcgcttccggctagcctc

SEQ ID NO: 8216 - RNA, 21 nt, synthetic construct
  source 1..21: mol_type = other RNA
ggagcggaaaatgctcgaaac

SEQ ID NO: 8217 - RNA, 21 nt, synthetic construct
  source 1..21: mol_type = other RNA
ggagcggaactctggtgggag

SEQ ID NO: 8218 - RNA, 21 nt, synthetic construct
  source 1..21: mol_type = other RNA
ggagctttactccaaccagaa

SEQ ID NO: 8219 - RNA, 21 nt, synthetic construct
  source 1..21: mol_type = other RNA
ggaggaccgtaccaacgcccg

SEQ ID NO: 8220 - RNA, 21 nt, synthetic construct
  source 1..21: mol_type = other RNA
ggaggacgcccgcgccagagc

SEQ ID NO: 8221 - RNA, 21 nt, synthetic construct
  source 1..21: mol_type = other RNA
ggaggagaaacggccaatcgg

SEQ ID NO: 8222 - RNA, 21 nt, synthetic construct
  source 1..21: mol_type = other RNA
ggaggagcgcttccggctagc

SEQ ID NO: 8223 - RNA, 21 nt, synthetic construct
  source 1..21: mol_type = other RNA
ggaggagcgggggtcggtccg

SEQ ID NO: 8224 - RNA, 21 nt, synthetic construct
  source 1..21: mol_type = other RNA
ggaggaggtgacccttccctc

SEQ ID NO: 8225 - RNA, 21 nt, synthetic construct
  source 1..21: mol_type = other RNA
ggaggatgctgccacttctca

SEQ ID NO: 8226 - RNA, 21 nt, synthetic construct
  source 1..21: mol_type = other RNA
ggaggcggcaggactcgagtt

SEQ ID NO: 8227 - RNA, 21 nt, synthetic construct
  source 1..21: mol_type = other RNA
ggaggcgggcgttggtacggt

SEQ ID NO: 8228 - RNA, 21 nt, synthetic construct
  source 1..21: mol_type = other RNA
ggagggaaaggggtggctgga

SEQ ID NO: 8229 - RNA, 21 nt, synthetic construct
  source 1..21: mol_type = other RNA
ggagggaagggtcacctcctc

SEQ ID NO: 8230 - RNA, 21 nt, synthetic construct
  source 1..21: mol_type = other RNA
ggagggagaagggagcggaaa

SEQ ID NO: 8231 - RNA, 21 nt, synthetic construct
  source 1..21: mol_type = other RNA
ggagggaggcccgccctgcgg

SEQ ID NO: 8232 - RNA, 21 nt, synthetic construct
  source 1..21: mol_type = other RNA
ggagggcagcaagaggcctct

SEQ ID NO: 8233 - RNA, 21 nt, synthetic construct
  source 1..21: mol_type = other RNA
ggagggccaggcccacgaccc

SEQ ID NO: 8234 - RNA, 21 nt, synthetic construct
  source 1..21: mol_type = other RNA
ggaggggaagcgtcctgaccc

SEQ ID NO: 8235 - RNA, 21 nt, synthetic construct
  source 1..21: mol_type = other RNA
ggaggggagatcgcggccccc

SEQ ID NO: 8236 - RNA, 21 nt, synthetic construct
  source 1..21: mol_type = other RNA
ggaggggagggtcagtgaaat

SEQ ID NO: 8237 - RNA, 21 nt, synthetic construct
  source 1..21: mol_type = other RNA
ggaggggaggtgcggtacact

SEQ ID NO: 8238 - RNA, 21 nt, synthetic construct
  source 1..21: mol_type = other RNA
ggagggggagggagaagggag

SEQ ID NO: 8239 - RNA, 21 nt, synthetic construct
  source 1..21: mol_type = other RNA
ggagggtcagtgaaatcggct

SEQ ID NO: 8240 - RNA, 21 nt, synthetic construct
  source 1..21: mol_type = other RNA
ggagggtgggaggacgcccgc

SEQ ID NO: 8241 - RNA, 21 nt, synthetic construct
  source 1..21: mol_type = other RNA
ggaggtgacccttccctcccc

SEQ ID NO: 8242 - RNA, 21 nt, synthetic construct
  source 1..21: mol_type = other RNA
ggaggtgcggtacactggggg

SEQ ID NO: 8243 - RNA, 21 nt, synthetic construct
  source 1..21: mol_type = other RNA
ggagtaaagctcctgtcagtt

SEQ ID NO: 8244 - RNA, 21 nt, synthetic construct
  source 1..21: mol_type = other RNA
ggagtacgcagccgcttagcg

SEQ ID NO: 8245 - RNA, 21 nt, synthetic construct
  source 1..21: mol_type = other RNA
ggagtaggcagttcccaggaa

SEQ ID NO: 8246 - RNA, 21 nt, synthetic construct
  source 1..21: mol_type = other RNA
ggagtcggtttacccgccgcc

SEQ ID NO: 8247 - RNA, 21 nt, synthetic construct
  source 1..21: mol_type = other RNA
ggagtgtaggaaagagccctg

SEQ ID NO: 8248 - RNA, 21 nt, synthetic construct
  source 1..21: mol_type = other RNA
ggagttgagccagattgtgtc

SEQ ID NO: 8249 - RNA, 21 nt, synthetic construct
  source 1..21: mol_type = other RNA
ggagttgggtcgcctagatta

SEQ ID NO: 8250 - RNA, 21 nt, synthetic construct
  source 1..21: mol_type = other RNA
ggatctctctccctgggaaaa

SEQ ID NO: 8251 - RNA, 21 nt, synthetic construct
  source 1..21: mol_type = other RNA
ggatgcaggcgggagggaggc

SEQ ID NO: 8252 - RNA, 21 nt, synthetic construct
  source 1..21: mol_type = other RNA
ggatgctgccacttctcaccc

SEQ ID NO: 8253 - RNA, 21 nt, synthetic construct
  source 1..21: mol_type = other RNA
ggatgggtggctaggggggcc

SEQ ID NO: 8254 - RNA, 21 nt, synthetic construct
  source 1..21: mol_type = other RNA
ggattcccagcgccggcgcca

SEQ ID NO: 8255 - RNA, 21 nt, synthetic construct
  source 1..21: mol_type = other RNA
ggcaacccccgcaagccacca

SEQ ID NO: 8256 - RNA, 21 nt, synthetic construct
  source 1..21: mol_type = other RNA
ggcaaccggagggggagggag

SEQ ID NO: 8257 - RNA, 21 nt, synthetic construct
  source 1..21: mol_type = other RNA
ggcaacgcgagagtcgctaag

SEQ ID NO: 8258 - RNA, 21 nt, synthetic construct
  source 1..21: mol_type = other RNA
ggcaagtaaaacgacacaatc

SEQ ID NO: 8259 - RNA, 21 nt, synthetic construct
  source 1..21: mol_type = other RNA
ggcacacgccacggggagcca

SEQ ID NO: 8260 - RNA, 21 nt, synthetic construct
  source 1..21: mol_type = other RNA
ggcactactgtgttggcggac

SEQ ID NO: 8261 - RNA, 21 nt, synthetic construct
  source 1..21: mol_type = other RNA
ggcactcccgggaggcggcag

SEQ ID NO: 8262 - RNA, 21 nt, synthetic construct
  source 1..21: mol_type = other RNA
ggcactcgtgggggtggggga

SEQ ID NO: 8263 - RNA, 21 nt, synthetic construct
  source 1..21: mol_type = other RNA
ggcagaaaaatattcccttta

SEQ ID NO: 8264 - RNA, 21 nt, synthetic construct
  source 1..21: mol_type = other RNA
ggcagaaaggcggagcgagcc

SEQ ID NO: 8265 - RNA, 21 nt, synthetic construct
  source 1..21: mol_type = other RNA
ggcagcaagaggcctctcctc

SEQ ID NO: 8266 - RNA, 21 nt, synthetic construct
  source 1..21: mol_type = other RNA
ggcagcatcctcctaagagct

SEQ ID NO: 8267 - RNA, 21 nt, synthetic construct
  source 1..21: mol_type = other RNA
ggcagcgcctgggacaaggta

SEQ ID NO: 8268 - RNA, 21 nt, synthetic construct
  source 1..21: mol_type = other RNA
ggcagcgggctgagtgagctg

SEQ ID NO: 8269 - RNA, 21 nt, synthetic construct
  source 1..21: mol_type = other RNA
ggcagctcactcagcccgctg

SEQ ID NO: 8270 - RNA, 21 nt, synthetic construct
  source 1..21: mol_type = other RNA
ggcaggactcgagttaggccc

SEQ ID NO: 8271 - RNA, 21 nt, synthetic construct
  source 1..21: mol_type = other RNA
ggcagggccagggaaagaggg

SEQ ID NO: 8272 - RNA, 21 nt, synthetic construct
  source 1..21: mol_type = other RNA
ggcagttcccaggaaaggggg

SEQ ID NO: 8273 - RNA, 21 nt, synthetic construct
  source 1..21: mol_type = other RNA
ggcattaccttcgccaccccc

SEQ ID NO: 8274 - RNA, 21 nt, synthetic construct
  source 1..21: mol_type = other RNA
ggccaatcggcgacaagaggc

SEQ ID NO: 8275 - RNA, 21 nt, synthetic construct
  source 1..21: mol_type = other RNA
ggccaatggcgcggcgggagg

SEQ ID NO: 8276 - RNA, 21 nt, synthetic construct
  source 1..21: mol_type = other RNA
ggccaatgggtgcggggcggt

SEQ ID NO: 8277 - RNA, 21 nt, synthetic construct
  source 1..21: mol_type = other RNA
ggccagacactgcggcgctcg

SEQ ID NO: 8278 - RNA, 21 nt, synthetic construct
  source 1..21: mol_type = other RNA
ggccaggaaacgccgtggcgc

SEQ ID NO: 8279 - RNA, 21 nt, synthetic construct
  source 1..21: mol_type = other RNA
ggccaggcccacgacccaagg

SEQ ID NO: 8280 - RNA, 21 nt, synthetic construct
  source 1..21: mol_type = other RNA
ggccagggaaagaggggggcc

SEQ ID NO: 8281 - RNA, 21 nt, synthetic construct
  source 1..21: mol_type = other RNA
ggccattcccggccaggaaac

SEQ ID NO: 8282 - RNA, 21 nt, synthetic construct
  source 1..21: mol_type = other RNA
ggcccaacgcggcgccacggc

SEQ ID NO: 8283 - RNA, 21 nt, synthetic construct
  source 1..21: mol_type = other RNA
ggcccacgacccaaggagagc

SEQ ID NO: 8284 - RNA, 21 nt, synthetic construct
  source 1..21: mol_type = other RNA
ggcccactcgccgccaatcag

SEQ ID NO: 8285 - RNA, 21 nt, synthetic construct
  source 1..21: mol_type = other RNA
ggcccaggccccggcagcgcc

SEQ ID NO: 8286 - RNA, 21 nt, synthetic construct
  source 1..21: mol_type = other RNA
ggccccaggggagggaagggt

SEQ ID NO: 8287 - RNA, 21 nt, synthetic construct
  source 1..21: mol_type = other RNA
ggcccccagagcgatcagagt

SEQ ID NO: 8288 - RNA, 21 nt, synthetic construct
  source 1..21: mol_type = other RNA
ggcccccctagccacccatcc

SEQ ID NO: 8289 - RNA, 21 nt, synthetic construct
  source 1..21: mol_type = other RNA
ggcccccctctttccctggcc

SEQ ID NO: 8290 - RNA, 21 nt, synthetic construct
  source 1..21: mol_type = other RNA
ggccccggcagcgcctgggac

SEQ ID NO: 8291 - RNA, 21 nt, synthetic construct
  source 1..21: mol_type = other RNA
ggccccggcggcttccgctga

SEQ ID NO: 8292 - RNA, 21 nt, synthetic construct
  source 1..21: mol_type = other RNA
ggcccgatcgtgaggttcggt

SEQ ID NO: 8293 - RNA, 21 nt, synthetic construct
  source 1..21: mol_type = other RNA
ggcccggtcccacagcttcga

SEQ ID NO: 8294 - RNA, 21 nt, synthetic construct
  source 1..21: mol_type = other RNA
ggcccgtacccgtgaggtggg

SEQ ID NO: 8295 - RNA, 21 nt, synthetic construct
  source 1..21: mol_type = other RNA
ggccctccccaagctcttagg

SEQ ID NO: 8296 - RNA, 21 nt, synthetic construct
  source 1..21: mol_type = other RNA
ggcccttgctactggctcgag

SEQ ID NO: 8297 - RNA, 21 nt, synthetic construct
  source 1..21: mol_type = other RNA
ggccgagacttctggatggcg

SEQ ID NO: 8298 - RNA, 21 nt, synthetic construct
  source 1..21: mol_type = other RNA
ggccgccgccatccagaagtc

SEQ ID NO: 8299 - RNA, 21 nt, synthetic construct
  source 1..21: mol_type = other RNA
ggccgccgcccgcctgcgctc

SEQ ID NO: 8300 - RNA, 21 nt, synthetic construct
  source 1..21: mol_type = other RNA
ggccgcctagagaagaggctg

SEQ ID NO: 8301 - RNA, 21 nt, synthetic construct
  source 1..21: mol_type = other RNA
ggccgcgagaacgggggtagg

SEQ ID NO: 8302 - RNA, 21 nt, synthetic construct
  source 1..21: mol_type = other RNA
ggccgcgatctcccctccgta

SEQ ID NO: 8303 - RNA, 21 nt, synthetic construct
  source 1..21: mol_type = other RNA
ggccgcgcccgcacacccagc

SEQ ID NO: 8304 - RNA, 21 nt, synthetic construct
  source 1..21: mol_type = other RNA
ggccggcactactgtgttggc

SEQ ID NO: 8305 - RNA, 21 nt, synthetic construct
  source 1..21: mol_type = other RNA
ggccggccgcgcccgcacacc

SEQ ID NO: 8306 - RNA, 21 nt, synthetic construct
  source 1..21: mol_type = other RNA
ggccgggaatggcccgtaccc

SEQ ID NO: 8307 - RNA, 21 nt, synthetic construct
  source 1..21: mol_type = other RNA
ggccgtctggtggcttgcggg

SEQ ID NO: 8308 - RNA, 21 nt, synthetic construct
  source 1..21: mol_type = other RNA
ggccgtttctcctcccgccgt

SEQ ID NO: 8309 - RNA, 21 nt, synthetic construct
  source 1..21: mol_type = other RNA
ggcctaactcgagtcctgccg

SEQ ID NO: 8310 - RNA, 21 nt, synthetic construct
  source 1..21: mol_type = other RNA
ggcctccctcccgcctgcatc

SEQ ID NO: 8311 - RNA, 21 nt, synthetic construct
  source 1..21: mol_type = other RNA
ggcctcctgcggcgggagggg

SEQ ID NO: 8312 - RNA, 21 nt, synthetic construct
  source 1..21: mol_type = other RNA
ggcctcggggaggaccgtacc

SEQ ID NO: 8313 - RNA, 21 nt, synthetic construct
  source 1..21: mol_type = other RNA
ggcctctccgcccaccgcccc

SEQ ID NO: 8314 - RNA, 21 nt, synthetic construct
  source 1..21: mol_type = other RNA
ggcctctcctcaagggaaagg

SEQ ID NO: 8315 - RNA, 21 nt, synthetic construct
  source 1..21: mol_type = other RNA
ggcctcttgctgccctccgct

SEQ ID NO: 8316 - RNA, 21 nt, synthetic construct
  source 1..21: mol_type = other RNA
ggcctggccctccccaagctc

SEQ ID NO: 8317 - RNA, 21 nt, synthetic construct
  source 1..21: mol_type = other RNA
ggccttgtgacagacaactct

SEQ ID NO: 8318 - RNA, 21 nt, synthetic construct
  source 1..21: mol_type = other RNA
ggcgaaggtaatgcctttggg

SEQ ID NO: 8319 - RNA, 21 nt, synthetic construct
  source 1..21: mol_type = other RNA
ggcgacaagaggctagccgga

SEQ ID NO: 8320 - RNA, 21 nt, synthetic construct
  source 1..21: mol_type = other RNA
ggcgacccaactccccctttc

SEQ ID NO: 8321 - RNA, 21 nt, synthetic construct
  source 1..21: mol_type = other RNA
ggcgagacaagcccgacctgc

SEQ ID NO: 8322 - RNA, 21 nt, synthetic construct
  source 1..21: mol_type = other RNA
ggcgaggggggtgagaagtgg

SEQ ID NO: 8323 - RNA, 21 nt, synthetic construct
  source 1..21: mol_type = other RNA
ggcgagtgggccaatgggtgc

SEQ ID NO: 8324 - RNA, 21 nt, synthetic construct
  source 1..21: mol_type = other RNA
ggcgccacggcgtttcctggc

SEQ ID NO: 8325 - RNA, 21 nt, synthetic construct
  source 1..21: mol_type = other RNA
ggcgccgcgttgggcctaact

SEQ ID NO: 8326 - RNA, 21 nt, synthetic construct
  source 1..21: mol_type = other RNA
ggcgccggcgctgggaatccc

SEQ ID NO: 8327 - RNA, 21 nt, synthetic construct
  source 1..21: mol_type = other RNA
ggcgcgggcgtcctcccaccc

SEQ ID NO: 8328 - RNA, 21 nt, synthetic construct
  source 1..21: mol_type = other RNA
ggcgctccggctcctcagaga

SEQ ID NO: 8329 - RNA, 21 nt, synthetic construct
  source 1..21: mol_type = other RNA
ggcgctcggcctcggggagga

SEQ ID NO: 8330 - RNA, 21 nt, synthetic construct
  source 1..21: mol_type = other RNA
ggcgctgggaatccccgtgcg

SEQ ID NO: 8331 - RNA, 21 nt, synthetic construct
  source 1..21: mol_type = other RNA
ggcggactggcgggactgggg

SEQ ID NO: 8332 - RNA, 21 nt, synthetic construct
  source 1..21: mol_type = other RNA
ggcggagaggccaatggcgcg

SEQ ID NO: 8333 - RNA, 21 nt, synthetic construct
  source 1..21: mol_type = other RNA
ggcggagccgcggccgccgcc

SEQ ID NO: 8334 - RNA, 21 nt, synthetic construct
  source 1..21: mol_type = other RNA
ggcggagcgagccaaaggcgg

SEQ ID NO: 8335 - RNA, 21 nt, synthetic construct
  source 1..21: mol_type = other RNA
ggcggcagctcactcagcccg

SEQ ID NO: 8336 - RNA, 21 nt, synthetic construct
  source 1..21: mol_type = other RNA
ggcggcaggactcgagttagg

SEQ ID NO: 8337 - RNA, 21 nt, synthetic construct
  source 1..21: mol_type = other RNA
ggcggccccggcggcttccgc

SEQ ID NO: 8338 - RNA, 21 nt, synthetic construct
  source 1..21: mol_type = other RNA
ggcggcgaggggggtgagaag

SEQ ID NO: 8339 - RNA, 21 nt, synthetic construct
  source 1..21: mol_type = other RNA
ggcggcgagtgggccaatggg

SEQ ID NO: 8340 - RNA, 21 nt, synthetic construct
  source 1..21: mol_type = other RNA
ggcggcggcagctcactcagc

SEQ ID NO: 8341 - RNA, 21 nt, synthetic construct
  source 1..21: mol_type = other RNA
ggcggcggcggcagctcactc

SEQ ID NO: 8342 - RNA, 21 nt, synthetic construct
  source 1..21: mol_type = other RNA
ggcggcgggtaaaccgactcc

SEQ ID NO: 8343 - RNA, 21 nt, synthetic construct
  source 1..21: mol_type = other RNA
ggcggcttccgctgattggcg

SEQ ID NO: 8344 - RNA, 21 nt, synthetic construct
  source 1..21: mol_type = other RNA
ggcgggactggggctgcgtga

SEQ ID NO: 8345 - RNA, 21 nt, synthetic construct
  source 1..21: mol_type = other RNA
ggcgggaggagaaacggccaa

SEQ ID NO: 8346 - RNA, 21 nt, synthetic construct
  source 1..21: mol_type = other RNA
ggcgggaggggagggtcagtg

SEQ ID NO: 8347 - RNA, 21 nt, synthetic construct
  source 1..21: mol_type = other RNA
ggcgggcctccctcccgcctg

SEQ ID NO: 8348 - RNA, 21 nt, synthetic construct
  source 1..21: mol_type = other RNA
ggcgggcgttggtacggtcct

SEQ ID NO: 8349 - RNA, 21 nt, synthetic construct
  source 1..21: mol_type = other RNA
ggcgggctgccggccgagact

SEQ ID NO: 8350 - RNA, 21 nt, synthetic construct
  source 1..21: mol_type = other RNA
ggcggggaggcgggcgttggt

SEQ ID NO: 8351 - RNA, 21 nt, synthetic construct
  source 1..21: mol_type = other RNA
ggcgggtaaaccgactccccc

SEQ ID NO: 8352 - RNA, 21 nt, synthetic construct
  source 1..21: mol_type = other RNA
ggcgggtaggtaggtggggtg

SEQ ID NO: 8353 - RNA, 21 nt, synthetic construct
  source 1..21: mol_type = other RNA
ggcggtgggcggagaggccaa

SEQ ID NO: 8354 - RNA, 21 nt, synthetic construct
  source 1..21: mol_type = other RNA
ggcgtaactgacaggagcttt

SEQ ID NO: 8355 - RNA, 21 nt, synthetic construct
  source 1..21: mol_type = other RNA
ggcgtattctggttggagtaa

SEQ ID NO: 8356 - RNA, 21 nt, synthetic construct
  source 1..21: mol_type = other RNA
ggcgtcagtggtctttctctt

SEQ ID NO: 8357 - RNA, 21 nt, synthetic construct
  source 1..21: mol_type = other RNA
ggcgtccaggaagattacgga

SEQ ID NO: 8358 - RNA, 21 nt, synthetic construct
  source 1..21: mol_type = other RNA
ggcgtcctcccaccctcccct

SEQ ID NO: 8359 - RNA, 21 nt, synthetic construct
  source 1..21: mol_type = other RNA
ggcgtggagaacgatcttgtg

SEQ ID NO: 8360 - RNA, 21 nt, synthetic construct
  source 1..21: mol_type = other RNA
ggcgtgtgccacagcgtgtct

SEQ ID NO: 8361 - RNA, 21 nt, synthetic construct
  source 1..21: mol_type = other RNA
ggcgttgggggaggggaagcg

SEQ ID NO: 8362 - RNA, 21 nt, synthetic construct
  source 1..21: mol_type = other RNA
ggcgttggtacggtcctcccc

SEQ ID NO: 8363 - RNA, 21 nt, synthetic construct
  source 1..21: mol_type = other RNA
ggcgtttccgctcgggcagcg

SEQ ID NO: 8364 - RNA, 21 nt, synthetic construct
  source 1..21: mol_type = other RNA
ggcgtttcctggccgggaatg

SEQ ID NO: 8365 - RNA, 21 nt, synthetic construct
  source 1..21: mol_type = other RNA
ggctagccggaagcgctcctc

SEQ ID NO: 8366 - RNA, 21 nt, synthetic construct
  source 1..21: mol_type = other RNA
ggctagcctcttgtcgccgat

SEQ ID NO: 8367 - RNA, 21 nt, synthetic construct
  source 1..21: mol_type = other RNA
ggctaggggggccgtctggtg

SEQ ID NO: 8368 - RNA, 21 nt, synthetic construct
  source 1..21: mol_type = other RNA
ggctaggtaggggagcggaac

SEQ ID NO: 8369 - RNA, 21 nt, synthetic construct
  source 1..21: mol_type = other RNA
ggctatctcagacacgctgtg

SEQ ID NO: 8370 - RNA, 21 nt, synthetic construct
  source 1..21: mol_type = other RNA
ggctcaactccaggctcgaac

SEQ ID NO: 8371 - RNA, 21 nt, synthetic construct
  source 1..21: mol_type = other RNA
ggctccccgtggcgtgtgcca

SEQ ID NO: 8372 - RNA, 21 nt, synthetic construct
  source 1..21: mol_type = other RNA
ggctccgccccgggttcccac

SEQ ID NO: 8373 - RNA, 21 nt, synthetic construct
  source 1..21: mol_type = other RNA
ggctccgtccggtttcgagca

SEQ ID NO: 8374 - RNA, 21 nt, synthetic construct
  source 1..21: mol_type = other RNA
ggctcctcagagagcctcggc

SEQ ID NO: 8375 - RNA, 21 nt, synthetic construct
  source 1..21: mol_type = other RNA
ggctcgaaccctacacattca

SEQ ID NO: 8376 - RNA, 21 nt, synthetic construct
  source 1..21: mol_type = other RNA
ggctcgagtctcacatgagcg

SEQ ID NO: 8377 - RNA, 21 nt, synthetic construct
  source 1..21: mol_type = other RNA
ggctcgctccgcctttctgcc

SEQ ID NO: 8378 - RNA, 21 nt, synthetic construct
  source 1..21: mol_type = other RNA
ggctctctgaggagccggagc

SEQ ID NO: 8379 - RNA, 21 nt, synthetic construct
  source 1..21: mol_type = other RNA
ggctctggcgcgggcgtcctc

SEQ ID NO: 8380 - RNA, 21 nt, synthetic construct
  source 1..21: mol_type = other RNA
ggctctttcctacactcctct

SEQ ID NO: 8381 - RNA, 21 nt, synthetic construct
  source 1..21: mol_type = other RNA
ggctgccggccgagacttctg

SEQ ID NO: 8382 - RNA, 21 nt, synthetic construct
  source 1..21: mol_type = other RNA
ggctgcgtactcccgacggcg

SEQ ID NO: 8383 - RNA, 21 nt, synthetic construct
  source 1..21: mol_type = other RNA
ggctgcgtgagtctctgagcg

SEQ ID NO: 8384 - RNA, 21 nt, synthetic construct
  source 1..21: mol_type = other RNA
ggctgcttcccaaaggcatta

SEQ ID NO: 8385 - RNA, 21 nt, synthetic construct
  source 1..21: mol_type = other RNA
ggctggatgcaggcgggaggg

SEQ ID NO: 8386 - RNA, 21 nt, synthetic construct
  source 1..21: mol_type = other RNA
ggctgtcgaagctgtgggacc

SEQ ID NO: 8387 - RNA, 21 nt, synthetic construct
  source 1..21: mol_type = other RNA
ggctgtgcttcggcgctccgg

SEQ ID NO: 8388 - RNA, 21 nt, synthetic construct
  source 1..21: mol_type = other RNA
ggcttcccacctcagatggct

SEQ ID NO: 8389 - RNA, 21 nt, synthetic construct
  source 1..21: mol_type = other RNA
ggcttccgctgattggcggcg

SEQ ID NO: 8390 - RNA, 21 nt, synthetic construct
  source 1..21: mol_type = other RNA
ggcttgcgggggttgcctttc

SEQ ID NO: 8391 - RNA, 21 nt, synthetic construct
  source 1..21: mol_type = other RNA
ggcttgtctcgcccttcaggc

SEQ ID NO: 8392 - RNA, 21 nt, synthetic construct
  source 1..21: mol_type = other RNA
ggctttcccaacagtttaact

SEQ ID NO: 8393 - RNA, 21 nt, synthetic construct
  source 1..21: mol_type = other RNA
gggaaaatggggtgttgcaac

SEQ ID NO: 8394 - RNA, 21 nt, synthetic construct
  source 1..21: mol_type = other RNA
gggaaagagaattcataaagg

SEQ ID NO: 8395 - RNA, 21 nt, synthetic construct
  source 1..21: mol_type = other RNA
gggaaagaggggggccggcac

SEQ ID NO: 8396 - RNA, 21 nt, synthetic construct
  source 1..21: mol_type = other RNA
gggaaagccccttctatgcta

SEQ ID NO: 8397 - RNA, 21 nt, synthetic construct
  source 1..21: mol_type = other RNA
gggaaaggcaacccccgcaag

SEQ ID NO: 8398 - RNA, 21 nt, synthetic construct
  source 1..21: mol_type = other RNA
gggaaaggggtggctggatgc

SEQ ID NO: 8399 - RNA, 21 nt, synthetic construct
  source 1..21: mol_type = other RNA
gggaaaggtaaacgtggagta

SEQ ID NO: 8400 - RNA, 21 nt, synthetic construct
  source 1..21: mol_type = other RNA
gggaaagttaaactgttggga

SEQ ID NO: 8401 - RNA, 21 nt, synthetic construct
  source 1..21: mol_type = other RNA
gggaacataatgtttgttacg

SEQ ID NO: 8402 - RNA, 21 nt, synthetic construct
  source 1..21: mol_type = other RNA
gggaactgcctactccacgtt

SEQ ID NO: 8403 - RNA, 21 nt, synthetic construct
  source 1..21: mol_type = other RNA
gggaagcagccatctgaggtg

SEQ ID NO: 8404 - RNA, 21 nt, synthetic construct
  source 1..21: mol_type = other RNA
gggaagccagaaaacgagagg

SEQ ID NO: 8405 - RNA, 21 nt, synthetic construct
  source 1..21: mol_type = other RNA
gggaagcgtcctgacccagga

SEQ ID NO: 8406 - RNA, 21 nt, synthetic construct
  source 1..21: mol_type = other RNA
gggaaggcgtccaggaagatt

SEQ ID NO: 8407 - RNA, 21 nt, synthetic construct
  source 1..21: mol_type = other RNA
gggaagggtcacctcctccgt

SEQ ID NO: 8408 - RNA, 21 nt, synthetic construct
  source 1..21: mol_type = other RNA
gggaagtcgggaacataatgt

SEQ ID NO: 8409 - RNA, 21 nt, synthetic construct
  source 1..21: mol_type = other RNA
gggaatatttttctgcctttg

SEQ ID NO: 8410 - RNA, 21 nt, synthetic construct
  source 1..21: mol_type = other RNA
gggaatccccgtgcggtcagt

SEQ ID NO: 8411 - RNA, 21 nt, synthetic construct
  source 1..21: mol_type = other RNA
gggaatggcccgtacccgtga

SEQ ID NO: 8412 - RNA, 21 nt, synthetic construct
  source 1..21: mol_type = other RNA
gggaatgtgaagaggagtgta

SEQ ID NO: 8413 - RNA, 21 nt, synthetic construct
  source 1..21: mol_type = other RNA
gggacaaggtaagggtccgac

SEQ ID NO: 8414 - RNA, 21 nt, synthetic construct
  source 1..21: mol_type = other RNA
gggacacgccccctcccgccg

SEQ ID NO: 8415 - RNA, 21 nt, synthetic construct
  source 1..21: mol_type = other RNA
gggaccgggcccttgctactg

SEQ ID NO: 8416 - RNA, 21 nt, synthetic construct
  source 1..21: mol_type = other RNA
gggactggggctgcgtgagtc

SEQ ID NO: 8417 - RNA, 21 nt, synthetic construct
  source 1..21: mol_type = other RNA
gggagaagggagcggaaaatg

SEQ ID NO: 8418 - RNA, 21 nt, synthetic construct
  source 1..21: mol_type = other RNA
gggagacggaggaggtgaccc

SEQ ID NO: 8419 - RNA, 21 nt, synthetic construct
  source 1..21: mol_type = other RNA
gggagagagatccccctctaa

SEQ ID NO: 8420 - RNA, 21 nt, synthetic construct
  source 1..21: mol_type = other RNA
gggagatcgcggcccccagag

SEQ ID NO: 8421 - RNA, 21 nt, synthetic construct
  source 1..21: mol_type = other RNA
gggagccagagaacgtgtggt

SEQ ID NO: 8422 - RNA, 21 nt, synthetic construct
  source 1..21: mol_type = other RNA
gggagcggaaaatgctcgaaa

SEQ ID NO: 8423 - RNA, 21 nt, synthetic construct
  source 1..21: mol_type = other RNA
gggagcggaactctggtggga

SEQ ID NO: 8424 - RNA, 21 nt, synthetic construct
  source 1..21: mol_type = other RNA
gggaggaccgtaccaacgccc

SEQ ID NO: 8425 - RNA, 21 nt, synthetic construct
  source 1..21: mol_type = other RNA
gggaggacgcccgcgccagag

SEQ ID NO: 8426 - RNA, 21 nt, synthetic construct
  source 1..21: mol_type = other RNA
gggaggagaaacggccaatcg

SEQ ID NO: 8427 - RNA, 21 nt, synthetic construct
  source 1..21: mol_type = other RNA
gggaggagcgcttccggctag

SEQ ID NO: 8428 - RNA, 21 nt, synthetic construct
  source 1..21: mol_type = other RNA
gggaggagcgggggtcggtcc

SEQ ID NO: 8429 - RNA, 21 nt, synthetic construct
  source 1..21: mol_type = other RNA
gggaggcggcaggactcgagt

SEQ ID NO: 8430 - RNA, 21 nt, synthetic construct
  source 1..21: mol_type = other RNA
gggaggcgggcgttggtacgg

SEQ ID NO: 8431 - RNA, 21 nt, synthetic construct
  source 1..21: mol_type = other RNA
gggagggaaaggggtggctgg

SEQ ID NO: 8432 - RNA, 21 nt, synthetic construct
  source 1..21: mol_type = other RNA
gggagggaagggtcacctcct

SEQ ID NO: 8433 - RNA, 21 nt, synthetic construct
  source 1..21: mol_type = other RNA
gggagggagaagggagcggaa

SEQ ID NO: 8434 - RNA, 21 nt, synthetic construct
  source 1..21: mol_type = other RNA
gggagggccaggcccacgacc

SEQ ID NO: 8435 - RNA, 21 nt, synthetic construct
  source 1..21: mol_type = other RNA
gggaggggaagcgtcctgacc

SEQ ID NO: 8436 - RNA, 21 nt, synthetic construct
  source 1..21: mol_type = other RNA
gggaggggagggtcagtgaaa

SEQ ID NO: 8437 - RNA, 21 nt, synthetic construct
  source 1..21: mol_type = other RNA
gggaggggaggtgcggtacac

SEQ ID NO: 8438 - RNA, 21 nt, synthetic construct
  source 1..21: mol_type = other RNA
gggagggtcagtgaaatcggc

SEQ ID NO: 8439 - RNA, 21 nt, synthetic construct
  source 1..21: mol_type = other RNA
gggagggtgggaggacgcccg

SEQ ID NO: 8440 - RNA, 21 nt, synthetic construct
  source 1..21: mol_type = other RNA
gggaggtgcggtacactgggg

SEQ ID NO: 8441 - RNA, 21 nt, synthetic construct
  source 1..21: mol_type = other RNA
gggagtacgcagccgcttagc

SEQ ID NO: 8442 - RNA, 21 nt, synthetic construct
  source 1..21: mol_type = other RNA
gggagtcggtttacccgccgc

SEQ ID NO: 8443 - RNA, 21 nt, synthetic construct
  source 1..21: mol_type = other RNA
gggagttgggtcgcctagatt

SEQ ID NO: 8444 - RNA, 21 nt, synthetic construct
  source 1..21: mol_type = other RNA
gggatctctctccctgggaaa

SEQ ID NO: 8445 - RNA, 21 nt, synthetic construct
  source 1..21: mol_type = other RNA
gggatgggtggctaggggggc

SEQ ID NO: 8446 - RNA, 21 nt, synthetic construct
  source 1..21: mol_type = other RNA
gggattcccagcgccggcgcc

SEQ ID NO: 8447 - RNA, 21 nt, synthetic construct
  source 1..21: mol_type = other RNA
gggcaacgcgagagtcgctaa

SEQ ID NO: 8448 - RNA, 21 nt, synthetic construct
  source 1..21: mol_type = other RNA
gggcagaaaggcggagcgagc

SEQ ID NO: 8449 - RNA, 21 nt, synthetic construct
  source 1..21: mol_type = other RNA
gggcagcaagaggcctctcct

SEQ ID NO: 8450 - RNA, 21 nt, synthetic construct
  source 1..21: mol_type = other RNA
gggcagcgggctgagtgagct

SEQ ID NO: 8451 - RNA, 21 nt, synthetic construct
  source 1..21: mol_type = other RNA
gggcagggccagggaaagagg

SEQ ID NO: 8452 - RNA, 21 nt, synthetic construct
  source 1..21: mol_type = other RNA
gggccaatgggtgcggggcgg

SEQ ID NO: 8453 - RNA, 21 nt, synthetic construct
  source 1..21: mol_type = other RNA
gggccagacactgcggcgctc

SEQ ID NO: 8454 - RNA, 21 nt, synthetic construct
  source 1..21: mol_type = other RNA
gggccaggcccacgacccaag

SEQ ID NO: 8455 - RNA, 21 nt, synthetic construct
  source 1..21: mol_type = other RNA
gggccagggaaagaggggggc

SEQ ID NO: 8456 - RNA, 21 nt, synthetic construct
  source 1..21: mol_type = other RNA
gggccattcccggccaggaaa

SEQ ID NO: 8457 - RNA, 21 nt, synthetic construct
  source 1..21: mol_type = other RNA
gggccccaggggagggaaggg

SEQ ID NO: 8458 - RNA, 21 nt, synthetic construct
  source 1..21: mol_type = other RNA
gggcccgatcgtgaggttcgg

SEQ ID NO: 8459 - RNA, 21 nt, synthetic construct
  source 1..21: mol_type = other RNA
gggcccggtcccacagcttcg

SEQ ID NO: 8460 - RNA, 21 nt, synthetic construct
  source 1..21: mol_type = other RNA
gggcccttgctactggctcga

SEQ ID NO: 8461 - RNA, 21 nt, synthetic construct
  source 1..21: mol_type = other RNA
gggccgcctagagaagaggct

SEQ ID NO: 8462 - RNA, 21 nt, synthetic construct
  source 1..21: mol_type = other RNA
gggccgcgatctcccctccgt

SEQ ID NO: 8463 - RNA, 21 nt, synthetic construct
  source 1..21: mol_type = other RNA
gggccggcactactgtgttgg

SEQ ID NO: 8464 - RNA, 21 nt, synthetic construct
  source 1..21: mol_type = other RNA
gggccgtctggtggcttgcgg

SEQ ID NO: 8465 - RNA, 21 nt, synthetic construct
  source 1..21: mol_type = other RNA
gggcctaactcgagtcctgcc

SEQ ID NO: 8466 - RNA, 21 nt, synthetic construct
  source 1..21: mol_type = other RNA
gggcctccctcccgcctgcat

SEQ ID NO: 8467 - RNA, 21 nt, synthetic construct
  source 1..21: mol_type = other RNA
gggcctggccctccccaagct

SEQ ID NO: 8468 - RNA, 21 nt, synthetic construct
  source 1..21: mol_type = other RNA
gggcgagacaagcccgacctg

SEQ ID NO: 8469 - RNA, 21 nt, synthetic construct
  source 1..21: mol_type = other RNA
gggcggagaggccaatggcgc

SEQ ID NO: 8470 - RNA, 21 nt, synthetic construct
  source 1..21: mol_type = other RNA
gggcgggcctccctcccgcct

SEQ ID NO: 8471 - RNA, 21 nt, synthetic construct
  source 1..21: mol_type = other RNA
gggcgggctgccggccgagac

SEQ ID NO: 8472 - RNA, 21 nt, synthetic construct
  source 1..21: mol_type = other RNA
gggcgggtaggtaggtggggt

SEQ ID NO: 8473 - RNA, 21 nt, synthetic construct
  source 1..21: mol_type = other RNA
gggcggtgggcggagaggcca

SEQ ID NO: 8474 - RNA, 21 nt, synthetic construct
  source 1..21: mol_type = other RNA
gggcgtcagtggtctttctct

SEQ ID NO: 8475 - RNA, 21 nt, synthetic construct
  source 1..21: mol_type = other RNA
gggcgtcctcccaccctcccc

SEQ ID NO: 8476 - RNA, 21 nt, synthetic construct
  source 1..21: mol_type = other RNA
gggcgtggagaacgatcttgt

SEQ ID NO: 8477 - RNA, 21 nt, synthetic construct
  source 1..21: mol_type = other RNA
gggcgttggtacggtcctccc

SEQ ID NO: 8478 - RNA, 21 nt, synthetic construct
  source 1..21: mol_type = other RNA
gggctctttcctacactcctc

SEQ ID NO: 8479 - RNA, 21 nt, synthetic construct
  source 1..21: mol_type = other RNA
gggctgccggccgagacttct

SEQ ID NO: 8480 - RNA, 21 nt, synthetic construct
  source 1..21: mol_type = other RNA
gggctgcgtgagtctctgagc

SEQ ID NO: 8481 - RNA, 21 nt, synthetic construct
  source 1..21: mol_type = other RNA
gggcttgtctcgcccttcagg

SEQ ID NO: 8482 - RNA, 21 nt, synthetic construct
  source 1..21: mol_type = other RNA
gggctttcccaacagtttaac

SEQ ID NO: 8483 - RNA, 21 nt, synthetic construct
  source 1..21: mol_type = other RNA
ggggaagcgtcctgacccagg

SEQ ID NO: 8484 - RNA, 21 nt, synthetic construct
  source 1..21: mol_type = other RNA
ggggagacggaggaggtgacc

SEQ ID NO: 8485 - RNA, 21 nt, synthetic construct
  source 1..21: mol_type = other RNA
ggggagatcgcggcccccaga

SEQ ID NO: 8486 - RNA, 21 nt, synthetic construct
  source 1..21: mol_type = other RNA
ggggagccagagaacgtgtgg

SEQ ID NO: 8487 - RNA, 21 nt, synthetic construct
  source 1..21: mol_type = other RNA
ggggagcggaactctggtggg

SEQ ID NO: 8488 - RNA, 21 nt, synthetic construct
  source 1..21: mol_type = other RNA
ggggaggaccgtaccaacgcc

SEQ ID NO: 8489 - RNA, 21 nt, synthetic construct
  source 1..21: mol_type = other RNA
ggggaggagcgggggtcggtc

SEQ ID NO: 8490 - RNA, 21 nt, synthetic construct
  source 1..21: mol_type = other RNA
ggggaggcgggcgttggtacg

SEQ ID NO: 8491 - RNA, 21 nt, synthetic construct
  source 1..21: mol_type = other RNA
ggggagggaagggtcacctcc

SEQ ID NO: 8492 - RNA, 21 nt, synthetic construct
  source 1..21: mol_type = other RNA
ggggagggagaagggagcgga

SEQ ID NO: 8493 - RNA, 21 nt, synthetic construct
  source 1..21: mol_type = other RNA
ggggagggccaggcccacgac

SEQ ID NO: 8494 - RNA, 21 nt, synthetic construct
  source 1..21: mol_type = other RNA
ggggaggggaagcgtcctgac

SEQ ID NO: 8495 - RNA, 21 nt, synthetic construct
  source 1..21: mol_type = other RNA
ggggagggtcagtgaaatcgg

SEQ ID NO: 8496 - RNA, 21 nt, synthetic construct
  source 1..21: mol_type = other RNA
ggggagggtgggaggacgccc

SEQ ID NO: 8497 - RNA, 21 nt, synthetic construct
  source 1..21: mol_type = other RNA
ggggaggtgcggtacactggg

SEQ ID NO: 8498 - RNA, 21 nt, synthetic construct
  source 1..21: mol_type = other RNA
ggggagtcggtttacccgccg

SEQ ID NO: 8499 - RNA, 21 nt, synthetic construct
  source 1..21: mol_type = other RNA
ggggagttgggtcgcctagat

SEQ ID NO: 8500 - RNA, 21 nt, synthetic construct
  source 1..21: mol_type = other RNA
ggggatctctctccctgggaa

SEQ ID NO: 8501 - RNA, 21 nt, synthetic construct
  source 1..21: mol_type = other RNA
ggggatgggtggctagggggg

SEQ ID NO: 8502 - RNA, 21 nt, synthetic construct
  source 1..21: mol_type = other RNA
ggggattcccagcgccggcgc

SEQ ID NO: 8503 - RNA, 21 nt, synthetic construct
  source 1..21: mol_type = other RNA
ggggcaacgcgagagtcgcta

SEQ ID NO: 8504 - RNA, 21 nt, synthetic construct
  source 1..21: mol_type = other RNA
ggggcagaaaggcggagcgag

SEQ ID NO: 8505 - RNA, 21 nt, synthetic construct
  source 1..21: mol_type = other RNA
ggggcagggccagggaaagag

SEQ ID NO: 8506 - RNA, 21 nt, synthetic construct
  source 1..21: mol_type = other RNA
ggggccagacactgcggcgct

SEQ ID NO: 8507 - RNA, 21 nt, synthetic construct
  source 1..21: mol_type = other RNA
ggggcccgatcgtgaggttcg

SEQ ID NO: 8508 - RNA, 21 nt, synthetic construct
  source 1..21: mol_type = other RNA
ggggccgcctagagaagaggc

SEQ ID NO: 8509 - RNA, 21 nt, synthetic construct
  source 1..21: mol_type = other RNA
ggggccgcgatctcccctccg

SEQ ID NO: 8510 - RNA, 21 nt, synthetic construct
  source 1..21: mol_type = other RNA
ggggccggcactactgtgttg

SEQ ID NO: 8511 - RNA, 21 nt, synthetic construct
  source 1..21: mol_type = other RNA
ggggccgtctggtggcttgcg

SEQ ID NO: 8512 - RNA, 21 nt, synthetic construct
  source 1..21: mol_type = other RNA
ggggcgggctgccggccgaga

SEQ ID NO: 8513 - RNA, 21 nt, synthetic construct
  source 1..21: mol_type = other RNA
ggggcgggtaggtaggtgggg

SEQ ID NO: 8514 - RNA, 21 nt, synthetic construct
  source 1..21: mol_type = other RNA
ggggcggtgggcggagaggcc

SEQ ID NO: 8515 - RNA, 21 nt, synthetic construct
  source 1..21: mol_type = other RNA
ggggctgcgtgagtctctgag

SEQ ID NO: 8516 - RNA, 21 nt, synthetic construct
  source 1..21: mol_type = other RNA
ggggctttcccaacagtttaa

SEQ ID NO: 8517 - RNA, 21 nt, synthetic construct
  source 1..21: mol_type = other RNA
gggggagggagaagggagcgg

SEQ ID NO: 8518 - RNA, 21 nt, synthetic construct
  source 1..21: mol_type = other RNA
gggggaggggaagcgtcctga

SEQ ID NO: 8519 - RNA, 21 nt, synthetic construct
  source 1..21: mol_type = other RNA
gggggagtcggtttacccgcc

SEQ ID NO: 8520 - RNA, 21 nt, synthetic construct
  source 1..21: mol_type = other RNA
gggggagttgggtcgcctaga

SEQ ID NO: 8521 - RNA, 21 nt, synthetic construct
  source 1..21: mol_type = other RNA
gggggatctctctccctggga

SEQ ID NO: 8522 - RNA, 21 nt, synthetic construct
  source 1..21: mol_type = other RNA
gggggatgggtggctaggggg

SEQ ID NO: 8523 - RNA, 21 nt, synthetic construct
  source 1..21: mol_type = other RNA
gggggcaacgcgagagtcgct

SEQ ID NO: 8524 - RNA, 21 nt, synthetic construct
  source 1..21: mol_type = other RNA
gggggcagaaaggcggagcga

SEQ ID NO: 8525 - RNA, 21 nt, synthetic construct
  source 1..21: mol_type = other RNA
gggggcagggccagggaaaga

SEQ ID NO: 8526 - RNA, 21 nt, synthetic construct
  source 1..21: mol_type = other RNA
gggggccgcgatctcccctcc

SEQ ID NO: 8527 - RNA, 21 nt, synthetic construct
  source 1..21: mol_type = other RNA
gggggccggcactactgtgtt

SEQ ID NO: 8528 - RNA, 21 nt, synthetic construct
  source 1..21: mol_type = other RNA
gggggccgtctggtggcttgc

SEQ ID NO: 8529 - RNA, 21 nt, synthetic construct
  source 1..21: mol_type = other RNA
gggggcgggctgccggccgag

SEQ ID NO: 8530 - RNA, 21 nt, synthetic construct
  source 1..21: mol_type = other RNA
ggggggatgggtggctagggg

SEQ ID NO: 8531 - RNA, 21 nt, synthetic construct
  source 1..21: mol_type = other RNA
ggggggcagaaaggcggagcg

SEQ ID NO: 8532 - RNA, 21 nt, synthetic construct
  source 1..21: mol_type = other RNA
ggggggcagggccagggaaag

SEQ ID NO: 8533 - RNA, 21 nt, synthetic construct
  source 1..21: mol_type = other RNA
ggggggccggcactactgtgt

SEQ ID NO: 8534 - RNA, 21 nt, synthetic construct
  source 1..21: mol_type = other RNA
ggggggccgtctggtggcttg

SEQ ID NO: 8535 - RNA, 21 nt, synthetic construct
  source 1..21: mol_type = other RNA
ggggggtgagaagtggcagca

SEQ ID NO: 8536 - RNA, 21 nt, synthetic construct
  source 1..21: mol_type = other RNA
gggggtagggagtgggggatc

SEQ ID NO: 8537 - RNA, 21 nt, synthetic construct
  source 1..21: mol_type = other RNA
gggggtgaagaggcgttgggg

SEQ ID NO: 8538 - RNA, 21 nt, synthetic construct
  source 1..21: mol_type = other RNA
gggggtgagaagtggcagcat

SEQ ID NO: 8539 - RNA, 21 nt, synthetic construct
  source 1..21: mol_type = other RNA
gggggtggcgaaggtaatgcc

SEQ ID NO: 8540 - RNA, 21 nt, synthetic construct
  source 1..21: mol_type = other RNA
gggggtggcggggaggcgggc

SEQ ID NO: 8541 - RNA, 21 nt, synthetic construct
  source 1..21: mol_type = other RNA
gggggtggggggcagaaaggc

SEQ ID NO: 8542 - RNA, 21 nt, synthetic construct
  source 1..21: mol_type = other RNA
gggggttgcctttcccgtggg

SEQ ID NO: 8543 - RNA, 21 nt, synthetic construct
  source 1..21: mol_type = other RNA
ggggtagggagtgggggatcg

SEQ ID NO: 8544 - RNA, 21 nt, synthetic construct
  source 1..21: mol_type = other RNA
ggggtgaagaggcgttggggg

SEQ ID NO: 8545 - RNA, 21 nt, synthetic construct
  source 1..21: mol_type = other RNA
ggggtgagaagtggcagcatc

SEQ ID NO: 8546 - RNA, 21 nt, synthetic construct
  source 1..21: mol_type = other RNA
ggggtggcgaaggtaatgcct

SEQ ID NO: 8547 - RNA, 21 nt, synthetic construct
  source 1..21: mol_type = other RNA
ggggtggcggggaggcgggcg

SEQ ID NO: 8548 - RNA, 21 nt, synthetic construct
  source 1..21: mol_type = other RNA
ggggtggctggatgcaggcgg

SEQ ID NO: 8549 - RNA, 21 nt, synthetic construct
  source 1..21: mol_type = other RNA
ggggtggggggcagaaaggcg

SEQ ID NO: 8550 - RNA, 21 nt, synthetic construct
  source 1..21: mol_type = other RNA
ggggtgtagagatgctgggtg

SEQ ID NO: 8551 - RNA, 21 nt, synthetic construct
  source 1..21: mol_type = other RNA
ggggtgttgcaacggtgtgtg

SEQ ID NO: 8552 - RNA, 21 nt, synthetic construct
  source 1..21: mol_type = other RNA
ggggttgcctttcccgtggga

SEQ ID NO: 8553 - RNA, 21 nt, synthetic construct
  source 1..21: mol_type = other RNA
gggtaaaccgactcccccgaa

SEQ ID NO: 8554 - RNA, 21 nt, synthetic construct
  source 1..21: mol_type = other RNA
gggtacgggccattcccggcc

SEQ ID NO: 8555 - RNA, 21 nt, synthetic construct
  source 1..21: mol_type = other RNA
gggtagggagtgggggatcgg

SEQ ID NO: 8556 - RNA, 21 nt, synthetic construct
  source 1..21: mol_type = other RNA
gggtaggtaggtggggtgtag

SEQ ID NO: 8557 - RNA, 21 nt, synthetic construct
  source 1..21: mol_type = other RNA
gggtcacctcctccgtctccc

SEQ ID NO: 8558 - RNA, 21 nt, synthetic construct
  source 1..21: mol_type = other RNA
gggtcaggacgcttcccctcc

SEQ ID NO: 8559 - RNA, 21 nt, synthetic construct
  source 1..21: mol_type = other RNA
gggtcagtgaaatcggctctg

SEQ ID NO: 8560 - RNA, 21 nt, synthetic construct
  source 1..21: mol_type = other RNA
gggtccgacagaaaagagacc

SEQ ID NO: 8561 - RNA, 21 nt, synthetic construct
  source 1..21: mol_type = other RNA
gggtcgcctagattagagggg

SEQ ID NO: 8562 - RNA, 21 nt, synthetic construct
  source 1..21: mol_type = other RNA
gggtcgtgggcctggccctcc

SEQ ID NO: 8563 - RNA, 21 nt, synthetic construct
  source 1..21: mol_type = other RNA
gggtgaagaggcgttggggga

SEQ ID NO: 8564 - RNA, 21 nt, synthetic construct
  source 1..21: mol_type = other RNA
gggtgagaagtggcagcatcc

SEQ ID NO: 8565 - RNA, 21 nt, synthetic construct
  source 1..21: mol_type = other RNA
gggtgcccctggcgccggcgc

SEQ ID NO: 8566 - RNA, 21 nt, synthetic construct
  source 1..21: mol_type = other RNA
gggtgcggggcggtgggcgga

SEQ ID NO: 8567 - RNA, 21 nt, synthetic construct
  source 1..21: mol_type = other RNA
gggtggcgaaggtaatgcctt

SEQ ID NO: 8568 - RNA, 21 nt, synthetic construct
  source 1..21: mol_type = other RNA
gggtggcggggaggcgggcgt

SEQ ID NO: 8569 - RNA, 21 nt, synthetic construct
  source 1..21: mol_type = other RNA
gggtggctaggggggccgtct

SEQ ID NO: 8570 - RNA, 21 nt, synthetic construct
  source 1..21: mol_type = other RNA
gggtggctggatgcaggcggg

SEQ ID NO: 8571 - RNA, 21 nt, synthetic construct
  source 1..21: mol_type = other RNA
gggtgggaggacgcccgcgcc

SEQ ID NO: 8572 - RNA, 21 nt, synthetic construct
  source 1..21: mol_type = other RNA
gggtggggcgggtaggtaggt

SEQ ID NO: 8573 - RNA, 21 nt, synthetic construct
  source 1..21: mol_type = other RNA
gggtggggggcagaaaggcgg

SEQ ID NO: 8574 - RNA, 21 nt, synthetic construct
  source 1..21: mol_type = other RNA
gggtgtagagatgctgggtgt

SEQ ID NO: 8575 - RNA, 21 nt, synthetic construct
  source 1..21: mol_type = other RNA
gggtgttgcaacggtgtgtgc

SEQ ID NO: 8576 - RNA, 21 nt, synthetic construct
  source 1..21: mol_type = other RNA
gggttcccaccgcctgaaggg

SEQ ID NO: 8577 - RNA, 21 nt, synthetic construct
  source 1..21: mol_type = other RNA
gggttcgagcctggagttgag

SEQ ID NO: 8578 - RNA, 21 nt, synthetic construct
  source 1..21: mol_type = other RNA
gggttgcctttcccgtgggaa

SEQ ID NO: 8579 - RNA, 21 nt, synthetic construct
  source 1..21: mol_type = other RNA
ggtaaaccgactcccccgaag

SEQ ID NO: 8580 - RNA, 21 nt, synthetic construct
  source 1..21: mol_type = other RNA
ggtaaacgtggagtaggcagt

SEQ ID NO: 8581 - RNA, 21 nt, synthetic construct
  source 1..21: mol_type = other RNA
ggtaaatcgcatgagagggaa

SEQ ID NO: 8582 - RNA, 21 nt, synthetic construct
  source 1..21: mol_type = other RNA
ggtaagggtccgacagaaaag

SEQ ID NO: 8583 - RNA, 21 nt, synthetic construct
  source 1..21: mol_type = other RNA
ggtaatgcctttgggaagcag

SEQ ID NO: 8584 - RNA, 21 nt, synthetic construct
  source 1..21: mol_type = other RNA
ggtacactggggggatgggtg

SEQ ID NO: 8585 - RNA, 21 nt, synthetic construct
  source 1..21: mol_type = other RNA
ggtacgggccattcccggcca

SEQ ID NO: 8586 - RNA, 21 nt, synthetic construct
  source 1..21: mol_type = other RNA
ggtacggtcctccccgaggcc

SEQ ID NO: 8587 - RNA, 21 nt, synthetic construct
  source 1..21: mol_type = other RNA
ggtagggagtgggggatcggg

SEQ ID NO: 8588 - RNA, 21 nt, synthetic construct
  source 1..21: mol_type = other RNA
ggtaggggagcggaactctgg

SEQ ID NO: 8589 - RNA, 21 nt, synthetic construct
  source 1..21: mol_type = other RNA
ggtaggtaggtggggtgtaga

SEQ ID NO: 8590 - RNA, 21 nt, synthetic construct
  source 1..21: mol_type = other RNA
ggtaggtggggtgtagagatg

SEQ ID NO: 8591 - RNA, 21 nt, synthetic construct
  source 1..21: mol_type = other RNA
ggtcacctcctccgtctcccc

SEQ ID NO: 8592 - RNA, 21 nt, synthetic construct
  source 1..21: mol_type = other RNA
ggtcaggacgcttcccctccc

SEQ ID NO: 8593 - RNA, 21 nt, synthetic construct
  source 1..21: mol_type = other RNA
ggtcagtgaaatcggctctgg

SEQ ID NO: 8594 - RNA, 21 nt, synthetic construct
  source 1..21: mol_type = other RNA
ggtcagtggcgtttccgctcg

SEQ ID NO: 8595 - RNA, 21 nt, synthetic construct
  source 1..21: mol_type = other RNA
ggtcccacagcttcgacagcc

SEQ ID NO: 8596 - RNA, 21 nt, synthetic construct
  source 1..21: mol_type = other RNA
ggtccgacagaaaagagaccg

SEQ ID NO: 8597 - RNA, 21 nt, synthetic construct
  source 1..21: mol_type = other RNA
ggtcctccccgaggccgagcg

SEQ ID NO: 8598 - RNA, 21 nt, synthetic construct
  source 1..21: mol_type = other RNA
ggtcgcctagattagaggggg

SEQ ID NO: 8599 - RNA, 21 nt, synthetic construct
  source 1..21: mol_type = other RNA
ggtcgggcttgtctcgccctt

SEQ ID NO: 8600 - RNA, 21 nt, synthetic construct
  source 1..21: mol_type = other RNA
ggtcgtgggcctggccctccc

SEQ ID NO: 8601 - RNA, 21 nt, synthetic construct
  source 1..21: mol_type = other RNA
ggtctcttttctgtcggaccc

SEQ ID NO: 8602 - RNA, 21 nt, synthetic construct
  source 1..21: mol_type = other RNA
ggtctttctcttggatatgga

SEQ ID NO: 8603 - RNA, 21 nt, synthetic construct
  source 1..21: mol_type = other RNA
ggtgaagaggcgttgggggag

SEQ ID NO: 8604 - RNA, 21 nt, synthetic construct
  source 1..21: mol_type = other RNA
ggtgacccttccctcccctgg

SEQ ID NO: 8605 - RNA, 21 nt, synthetic construct
  source 1..21: mol_type = other RNA
ggtgagaagtggcagcatcct

SEQ ID NO: 8606 - RNA, 21 nt, synthetic construct
  source 1..21: mol_type = other RNA
ggtgcccctggcgccggcgct

SEQ ID NO: 8607 - RNA, 21 nt, synthetic construct
  source 1..21: mol_type = other RNA
ggtgcggggcggtgggcggag

SEQ ID NO: 8608 - RNA, 21 nt, synthetic construct
  source 1..21: mol_type = other RNA
ggtgcggtacactggggggat

SEQ ID NO: 8609 - RNA, 21 nt, synthetic construct
  source 1..21: mol_type = other RNA
ggtggcgaaggtaatgccttt

SEQ ID NO: 8610 - RNA, 21 nt, synthetic construct
  source 1..21: mol_type = other RNA
ggtggcggggaggcgggcgtt

SEQ ID NO: 8611 - RNA, 21 nt, synthetic construct
  source 1..21: mol_type = other RNA
ggtggctaggggggccgtctg

SEQ ID NO: 8612 - RNA, 21 nt, synthetic construct
  source 1..21: mol_type = other RNA
ggtggctggatgcaggcggga

SEQ ID NO: 8613 - RNA, 21 nt, synthetic construct
  source 1..21: mol_type = other RNA
ggtggcttgcgggggttgcct

SEQ ID NO: 8614 - RNA, 21 nt, synthetic construct
  source 1..21: mol_type = other RNA
ggtgggaagccagaaaacgag

SEQ ID NO: 8615 - RNA, 21 nt, synthetic construct
  source 1..21: mol_type = other RNA
ggtgggaggacgcccgcgcca

SEQ ID NO: 8616 - RNA, 21 nt, synthetic construct
  source 1..21: mol_type = other RNA
ggtgggaggggaggtgcggta

SEQ ID NO: 8617 - RNA, 21 nt, synthetic construct
  source 1..21: mol_type = other RNA
ggtgggcggagaggccaatgg

SEQ ID NO: 8618 - RNA, 21 nt, synthetic construct
  source 1..21: mol_type = other RNA
ggtggggcgggtaggtaggtg

SEQ ID NO: 8619 - RNA, 21 nt, synthetic construct
  source 1..21: mol_type = other RNA
ggtggggggcagaaaggcgga

SEQ ID NO: 8620 - RNA, 21 nt, synthetic construct
  source 1..21: mol_type = other RNA
ggtgggggtggcgaaggtaat

SEQ ID NO: 8621 - RNA, 21 nt, synthetic construct
  source 1..21: mol_type = other RNA
ggtgggggtggggggcagaaa

SEQ ID NO: 8622 - RNA, 21 nt, synthetic construct
  source 1..21: mol_type = other RNA
ggtggggtgtagagatgctgg

SEQ ID NO: 8623 - RNA, 21 nt, synthetic construct
  source 1..21: mol_type = other RNA
ggtgtagagatgctgggtgtg

SEQ ID NO: 8624 - RNA, 21 nt, synthetic construct
  source 1..21: mol_type = other RNA
ggtgtcgaagacaagcaggcg

SEQ ID NO: 8625 - RNA, 21 nt, synthetic construct
  source 1..21: mol_type = other RNA
ggtgtgtgcaaggcggcgagg

SEQ ID NO: 8626 - RNA, 21 nt, synthetic construct
  source 1..21: mol_type = other RNA
ggtgttgcaacggtgtgtgca

SEQ ID NO: 8627 - RNA, 21 nt, synthetic construct
  source 1..21: mol_type = other RNA
ggttcaagtaggtaaatcgca

SEQ ID NO: 8628 - RNA, 21 nt, synthetic construct
  source 1..21: mol_type = other RNA
ggttcccaccgcctgaagggc

SEQ ID NO: 8629 - RNA, 21 nt, synthetic construct
  source 1..21: mol_type = other RNA
ggttcgagcctggagttgagc

SEQ ID NO: 8630 - RNA, 21 nt, synthetic construct
  source 1..21: mol_type = other RNA
ggttcggtctcttttctgtcg

SEQ ID NO: 8631 - RNA, 21 nt, synthetic construct
  source 1..21: mol_type = other RNA
ggttgcctttcccgtgggaag

SEQ ID NO: 8632 - RNA, 21 nt, synthetic construct
  source 1..21: mol_type = other RNA
ggttggagtaaagctcctgtc

SEQ ID NO: 8633 - RNA, 21 nt, synthetic construct
  source 1..21: mol_type = other RNA
ggtttacccgccgcctgcttg

SEQ ID NO: 8634 - RNA, 21 nt, synthetic construct
  source 1..21: mol_type = other RNA
ggtttcgagcattttccgctc

SEQ ID NO: 8635 - RNA, 21 nt, synthetic construct
  source 1..21: mol_type = other RNA
ggtttcgctcatgtgagactc

SEQ ID NO: 8636 - RNA, 21 nt, synthetic construct
  source 1..21: mol_type = other RNA
gtaaaacgacacaatctggct

SEQ ID NO: 8637 - RNA, 21 nt, synthetic construct
  source 1..21: mol_type = other RNA
gtaaaccgactcccccgaagg

SEQ ID NO: 8638 - RNA, 21 nt, synthetic construct
  source 1..21: mol_type = other RNA
gtaaacgtggagtaggcagtt

SEQ ID NO: 8639 - RNA, 21 nt, synthetic construct
  source 1..21: mol_type = other RNA
gtaaagctcctgtcagttacg

SEQ ID NO: 8640 - RNA, 21 nt, synthetic construct
  source 1..21: mol_type = other RNA
gtaaatcgcatgagagggaaa

SEQ ID NO: 8641 - RNA, 21 nt, synthetic construct
  source 1..21: mol_type = other RNA
gtaacaaacattatgttcccg

SEQ ID NO: 8642 - RNA, 21 nt, synthetic construct
  source 1..21: mol_type = other RNA
gtaactgacaggagctttact

SEQ ID NO: 8643 - RNA, 21 nt, synthetic construct
  source 1..21: mol_type = other RNA
gtaagggtccgacagaaaaga

SEQ ID NO: 8644 - RNA, 21 nt, synthetic construct
  source 1..21: mol_type = other RNA
gtaagtcgggaatgtgaagag

SEQ ID NO: 8645 - RNA, 21 nt, synthetic construct
  source 1..21: mol_type = other RNA
gtaatcttcctggacgccttc

SEQ ID NO: 8646 - RNA, 21 nt, synthetic construct
  source 1..21: mol_type = other RNA
gtaatgcctttgggaagcagc

SEQ ID NO: 8647 - RNA, 21 nt, synthetic construct
  source 1..21: mol_type = other RNA
gtacactggggggatgggtgg

SEQ ID NO: 8648 - RNA, 21 nt, synthetic construct
  source 1..21: mol_type = other RNA
gtaccaacgcccgcctccccg

SEQ ID NO: 8649 - RNA, 21 nt, synthetic construct
  source 1..21: mol_type = other RNA
gtacccgtgaggtgggggtgg

SEQ ID NO: 8650 - RNA, 21 nt, synthetic construct
  source 1..21: mol_type = other RNA
gtaccgcacctcccctcccac

SEQ ID NO: 8651 - RNA, 21 nt, synthetic construct
  source 1..21: mol_type = other RNA
gtacgcagccgcttagcgact

SEQ ID NO: 8652 - RNA, 21 nt, synthetic construct
  source 1..21: mol_type = other RNA
gtacgggccattcccggccag

SEQ ID NO: 8653 - RNA, 21 nt, synthetic construct
  source 1..21: mol_type = other RNA
gtacggtcctccccgaggccg

SEQ ID NO: 8654 - RNA, 21 nt, synthetic construct
  source 1..21: mol_type = other RNA
gtactcccgacggcgtaactg

SEQ ID NO: 8655 - RNA, 21 nt, synthetic construct
  source 1..21: mol_type = other RNA
gtagagatgctgggtgtgcgg

SEQ ID NO: 8656 - RNA, 21 nt, synthetic construct
  source 1..21: mol_type = other RNA
gtagcaagggcccggtcccac

SEQ ID NO: 8657 - RNA, 21 nt, synthetic construct
  source 1..21: mol_type = other RNA
gtagcaggtcgggcttgtctc

SEQ ID NO: 8658 - RNA, 21 nt, synthetic construct
  source 1..21: mol_type = other RNA
gtaggaaagagccctggttca

SEQ ID NO: 8659 - RNA, 21 nt, synthetic construct
  source 1..21: mol_type = other RNA
gtaggcagttcccaggaaagg

SEQ ID NO: 8660 - RNA, 21 nt, synthetic construct
  source 1..21: mol_type = other RNA
gtagggagtgggggatcgggg

SEQ ID NO: 8661 - RNA, 21 nt, synthetic construct
  source 1..21: mol_type = other RNA
gtaggggagcggaactctggt

SEQ ID NO: 8662 - RNA, 21 nt, synthetic construct
  source 1..21: mol_type = other RNA
gtagggttcgagcctggagtt

SEQ ID NO: 8663 - RNA, 21 nt, synthetic construct
  source 1..21: mol_type = other RNA
gtaggtaaatcgcatgagagg

SEQ ID NO: 8664 - RNA, 21 nt, synthetic construct
  source 1..21: mol_type = other RNA
gtaggtaggtggggtgtagag

SEQ ID NO: 8665 - RNA, 21 nt, synthetic construct
  source 1..21: mol_type = other RNA
gtaggtggggtgtagagatgc

SEQ ID NO: 8666 - RNA, 21 nt, synthetic construct
  source 1..21: mol_type = other RNA
gtagtgccggcccccctcttt

SEQ ID NO: 8667 - RNA, 21 nt, synthetic construct
  source 1..21: mol_type = other RNA
gtatgcctgtgtatttcgagc

SEQ ID NO: 8668 - RNA, 21 nt, synthetic construct
  source 1..21: mol_type = other RNA
gtattctggttggagtaaagc

SEQ ID NO: 8669 - RNA, 21 nt, synthetic construct
  source 1..21: mol_type = other RNA
gtatttcgagcggagggcagc

SEQ ID NO: 8670 - RNA, 21 nt, synthetic construct
  source 1..21: mol_type = other RNA
gtcacaaggccgcgagaacgg

SEQ ID NO: 8671 - RNA, 21 nt, synthetic construct
  source 1..21: mol_type = other RNA
gtcacctcctccgtctccccg

SEQ ID NO: 8672 - RNA, 21 nt, synthetic construct
  source 1..21: mol_type = other RNA
gtcaggacgcttcccctcccc

SEQ ID NO: 8673 - RNA, 21 nt, synthetic construct
  source 1..21: mol_type = other RNA
gtcagtgaaatcggctctggc

SEQ ID NO: 8674 - RNA, 21 nt, synthetic construct
  source 1..21: mol_type = other RNA
gtcagtggcgtttccgctcgg

SEQ ID NO: 8675 - RNA, 21 nt, synthetic construct
  source 1..21: mol_type = other RNA
gtcagtggtctttctcttgga

SEQ ID NO: 8676 - RNA, 21 nt, synthetic construct
  source 1..21: mol_type = other RNA
gtcagttacgccgtcgggagt

SEQ ID NO: 8677 - RNA, 21 nt, synthetic construct
  source 1..21: mol_type = other RNA
gtccaggaagattacggaggg

SEQ ID NO: 8678 - RNA, 21 nt, synthetic construct
  source 1..21: mol_type = other RNA
gtcccacagcttcgacagcca

SEQ ID NO: 8679 - RNA, 21 nt, synthetic construct
  source 1..21: mol_type = other RNA
gtcccgccagtccgccaacac

SEQ ID NO: 8680 - RNA, 21 nt, synthetic construct
  source 1..21: mol_type = other RNA
gtccgacagaaaagagaccga

SEQ ID NO: 8681 - RNA, 21 nt, synthetic construct
  source 1..21: mol_type = other RNA
gtccgccaacacagtagtgcc

SEQ ID NO: 8682 - RNA, 21 nt, synthetic construct
  source 1..21: mol_type = other RNA
gtccggtttcgagcattttcc

SEQ ID NO: 8683 - RNA, 21 nt, synthetic construct
  source 1..21: mol_type = other RNA
gtcctcccaccctccccttcc

SEQ ID NO: 8684 - RNA, 21 nt, synthetic construct
  source 1..21: mol_type = other RNA
gtcctccccgaggccgagcgc

SEQ ID NO: 8685 - RNA, 21 nt, synthetic construct
  source 1..21: mol_type = other RNA
gtcctgacccaggaaaaacat

SEQ ID NO: 8686 - RNA, 21 nt, synthetic construct
  source 1..21: mol_type = other RNA
gtcctgccgcctcccgggagt

SEQ ID NO: 8687 - RNA, 21 nt, synthetic construct
  source 1..21: mol_type = other RNA
gtccttgcttgtctcacttct

SEQ ID NO: 8688 - RNA, 21 nt, synthetic construct
  source 1..21: mol_type = other RNA
gtcgaagacaagcaggcggcg

SEQ ID NO: 8689 - RNA, 21 nt, synthetic construct
  source 1..21: mol_type = other RNA
gtcgaagctgtgggaccgggc

SEQ ID NO: 8690 - RNA, 21 nt, synthetic construct
  source 1..21: mol_type = other RNA
gtcgccgattggccgtttctc

SEQ ID NO: 8691 - RNA, 21 nt, synthetic construct
  source 1..21: mol_type = other RNA
gtcgcctagattagaggggga

SEQ ID NO: 8692 - RNA, 21 nt, synthetic construct
  source 1..21: mol_type = other RNA
gtcgctaagcggctgcgtact

SEQ ID NO: 8693 - RNA, 21 nt, synthetic construct
  source 1..21: mol_type = other RNA
gtcggacccttaccttgtccc

SEQ ID NO: 8694 - RNA, 21 nt, synthetic construct
  source 1..21: mol_type = other RNA
gtcgggaacataatgtttgtt

SEQ ID NO: 8695 - RNA, 21 nt, synthetic construct
  source 1..21: mol_type = other RNA
gtcgggaatgtgaagaggagt

SEQ ID NO: 8696 - RNA, 21 nt, synthetic construct
  source 1..21: mol_type = other RNA
gtcgggagtacgcagccgctt

SEQ ID NO: 8697 - RNA, 21 nt, synthetic construct
  source 1..21: mol_type = other RNA
gtcgggcttgtctcgcccttc

SEQ ID NO: 8698 - RNA, 21 nt, synthetic construct
  source 1..21: mol_type = other RNA
gtcggtttacccgccgcctgc

SEQ ID NO: 8699 - RNA, 21 nt, synthetic construct
  source 1..21: mol_type = other RNA
gtcgtgggcctggccctcccc

SEQ ID NO: 8700 - RNA, 21 nt, synthetic construct
  source 1..21: mol_type = other RNA
gtcgttttacttgccttgggc

SEQ ID NO: 8701 - RNA, 21 nt, synthetic construct
  source 1..21: mol_type = other RNA
gtctcacatgagcgaaaccac

SEQ ID NO: 8702 - RNA, 21 nt, synthetic construct
  source 1..21: mol_type = other RNA
gtctcacttcttgggcgtcag

SEQ ID NO: 8703 - RNA, 21 nt, synthetic construct
  source 1..21: mol_type = other RNA
gtctccccgcgctcgctctcc

SEQ ID NO: 8704 - RNA, 21 nt, synthetic construct
  source 1..21: mol_type = other RNA
gtctcgcccttcaggcggtgg

SEQ ID NO: 8705 - RNA, 21 nt, synthetic construct
  source 1..21: mol_type = other RNA
gtctcttttctgtcggaccct

SEQ ID NO: 8706 - RNA, 21 nt, synthetic construct
  source 1..21: mol_type = other RNA
gtctgagatagcctcgttgaa

SEQ ID NO: 8707 - RNA, 21 nt, synthetic construct
  source 1..21: mol_type = other RNA
gtctggccccgcgcccctgcg

SEQ ID NO: 8708 - RNA, 21 nt, synthetic construct
  source 1..21: mol_type = other RNA
gtctggtggcttgcgggggtt

SEQ ID NO: 8709 - RNA, 21 nt, synthetic construct
  source 1..21: mol_type = other RNA
gtctgtcacaaggccgcgaga

SEQ ID NO: 8710 - RNA, 21 nt, synthetic construct
  source 1..21: mol_type = other RNA
gtcttcgacacctgattggct

SEQ ID NO: 8711 - RNA, 21 nt, synthetic construct
  source 1..21: mol_type = other RNA
gtctttctcttggatatggat

SEQ ID NO: 8712 - RNA, 21 nt, synthetic construct
  source 1..21: mol_type = other RNA
gtgaaaacacaaatggcgtat

SEQ ID NO: 8713 - RNA, 21 nt, synthetic construct
  source 1..21: mol_type = other RNA
gtgaaatcggctctggcgcgg

SEQ ID NO: 8714 - RNA, 21 nt, synthetic construct
  source 1..21: mol_type = other RNA
gtgaagaggagtgtaggaaag

SEQ ID NO: 8715 - RNA, 21 nt, synthetic construct
  source 1..21: mol_type = other RNA
gtgaagaggcgttgggggagg

SEQ ID NO: 8716 - RNA, 21 nt, synthetic construct
  source 1..21: mol_type = other RNA
gtgacagacaactctgatcgc

SEQ ID NO: 8717 - RNA, 21 nt, synthetic construct
  source 1..21: mol_type = other RNA
gtgacccttccctcccctggg

SEQ ID NO: 8718 - RNA, 21 nt, synthetic construct
  source 1..21: mol_type = other RNA
gtgagaagtggcagcatcctc

SEQ ID NO: 8719 - RNA, 21 nt, synthetic construct
  source 1..21: mol_type = other RNA
gtgagaatatcttcaaaggca

SEQ ID NO: 8720 - RNA, 21 nt, synthetic construct
  source 1..21: mol_type = other RNA
gtgagacaagcaaggactcta

SEQ ID NO: 8721 - RNA, 21 nt, synthetic construct
  source 1..21: mol_type = other RNA
gtgagactcgagccagtagca

SEQ ID NO: 8722 - RNA, 21 nt, synthetic construct
  source 1..21: mol_type = other RNA
gtgaggtgggggtggggggca

SEQ ID NO: 8723 - RNA, 21 nt, synthetic construct
  source 1..21: mol_type = other RNA
gtgaggttcggtctcttttct

SEQ ID NO: 8724 - RNA, 21 nt, synthetic construct
  source 1..21: mol_type = other RNA
gtgagtctctgagcgcaggcg

SEQ ID NO: 8725 - RNA, 21 nt, synthetic construct
  source 1..21: mol_type = other RNA
gtgcaaggcggcgaggggggt

SEQ ID NO: 8726 - RNA, 21 nt, synthetic construct
  source 1..21: mol_type = other RNA
gtgccacagcgtgtctgagat

SEQ ID NO: 8727 - RNA, 21 nt, synthetic construct
  source 1..21: mol_type = other RNA
gtgcccctggcgccggcgctg

SEQ ID NO: 8728 - RNA, 21 nt, synthetic construct
  source 1..21: mol_type = other RNA
gtgccggcccccctctttccc

SEQ ID NO: 8729 - RNA, 21 nt, synthetic construct
  source 1..21: mol_type = other RNA
gtgcctgtagcaggtcgggct

SEQ ID NO: 8730 - RNA, 21 nt, synthetic construct
  source 1..21: mol_type = other RNA
gtgcggggcggtgggcggaga

SEQ ID NO: 8731 - RNA, 21 nt, synthetic construct
  source 1..21: mol_type = other RNA
gtgcggtacactggggggatg

SEQ ID NO: 8732 - RNA, 21 nt, synthetic construct
  source 1..21: mol_type = other RNA
gtgcggtcagtggcgtttccg

SEQ ID NO: 8733 - RNA, 21 nt, synthetic construct
  source 1..21: mol_type = other RNA
gtgcttcggcgctccggctcc

SEQ ID NO: 8734 - RNA, 21 nt, synthetic construct
  source 1..21: mol_type = other RNA
gtggagaacgatcttgtgaga

SEQ ID NO: 8735 - RNA, 21 nt, synthetic construct
  source 1..21: mol_type = other RNA
gtggagtaggcagttcccagg

SEQ ID NO: 8736 - RNA, 21 nt, synthetic construct
  source 1..21: mol_type = other RNA
gtggcacacgccacggggagc

SEQ ID NO: 8737 - RNA, 21 nt, synthetic construct
  source 1..21: mol_type = other RNA
gtggcagcatcctcctaagag

SEQ ID NO: 8738 - RNA, 21 nt, synthetic construct
  source 1..21: mol_type = other RNA
gtggcaggaagcgcgcgctgg

SEQ ID NO: 8739 - RNA, 21 nt, synthetic construct
  source 1..21: mol_type = other RNA
gtggcgaaggtaatgcctttg

SEQ ID NO: 8740 - RNA, 21 nt, synthetic construct
  source 1..21: mol_type = other RNA
gtggcgccgcgttgggcctaa

SEQ ID NO: 8741 - RNA, 21 nt, synthetic construct
  source 1..21: mol_type = other RNA
gtggcggggaggcgggcgttg

SEQ ID NO: 8742 - RNA, 21 nt, synthetic construct
  source 1..21: mol_type = other RNA
gtggcgtgtgccacagcgtgt

SEQ ID NO: 8743 - RNA, 21 nt, synthetic construct
  source 1..21: mol_type = other RNA
gtggcgtttccgctcgggcag

SEQ ID NO: 8744 - RNA, 21 nt, synthetic construct
  source 1..21: mol_type = other RNA
gtggctaggggggccgtctgg

SEQ ID NO: 8745 - RNA, 21 nt, synthetic construct
  source 1..21: mol_type = other RNA
gtggctggatgcaggcgggag

SEQ ID NO: 8746 - RNA, 21 nt, synthetic construct
  source 1..21: mol_type = other RNA
gtggcttgcgggggttgcctt

SEQ ID NO: 8747 - RNA, 21 nt, synthetic construct
  source 1..21: mol_type = other RNA
gtgggaagccagaaaacgaga

SEQ ID NO: 8748 - RNA, 21 nt, synthetic construct
  source 1..21: mol_type = other RNA
gtgggaagtcgggaacataat

SEQ ID NO: 8749 - RNA, 21 nt, synthetic construct
  source 1..21: mol_type = other RNA
gtgggaccgggcccttgctac

SEQ ID NO: 8750 - RNA, 21 nt, synthetic construct
  source 1..21: mol_type = other RNA
gtgggaggacgcccgcgccag

SEQ ID NO: 8751 - RNA, 21 nt, synthetic construct
  source 1..21: mol_type = other RNA
gtgggaggggaggtgcggtac

SEQ ID NO: 8752 - RNA, 21 nt, synthetic construct
  source 1..21: mol_type = other RNA
gtgggccaatgggtgcggggc

SEQ ID NO: 8753 - RNA, 21 nt, synthetic construct
  source 1..21: mol_type = other RNA
gtgggcctggccctccccaag

SEQ ID NO: 8754 - RNA, 21 nt, synthetic construct
  source 1..21: mol_type = other RNA
gtgggcggagaggccaatggc

SEQ ID NO: 8755 - RNA, 21 nt, synthetic construct
  source 1..21: mol_type = other RNA
gtggggcgggtaggtaggtgg

SEQ ID NO: 8756 - RNA, 21 nt, synthetic construct
  source 1..21: mol_type = other RNA
gtgggggaggagcgggggtcg

SEQ ID NO: 8757 - RNA, 21 nt, synthetic construct
  source 1..21: mol_type = other RNA
gtggggggcagaaaggcggag

SEQ ID NO: 8758 - RNA, 21 nt, synthetic construct
  source 1..21: mol_type = other RNA
gtgggggtggcgaaggtaatg

SEQ ID NO: 8759 - RNA, 21 nt, synthetic construct
  source 1..21: mol_type = other RNA
gtgggggtgggggaggagcgg

SEQ ID NO: 8760 - RNA, 21 nt, synthetic construct
  source 1..21: mol_type = other RNA
gtgggggtggggggcagaaag

SEQ ID NO: 8761 - RNA, 21 nt, synthetic construct
  source 1..21: mol_type = other RNA
gtggggtgtagagatgctggg

SEQ ID NO: 8762 - RNA, 21 nt, synthetic construct
  source 1..21: mol_type = other RNA
gtggtctttctcttggatatg

SEQ ID NO: 8763 - RNA, 21 nt, synthetic construct
  source 1..21: mol_type = other RNA
gtggtgggggtggcgaaggta

SEQ ID NO: 8764 - RNA, 21 nt, synthetic construct
  source 1..21: mol_type = other RNA
gtggtttcgctcatgtgagac

SEQ ID NO: 8765 - RNA, 21 nt, synthetic construct
  source 1..21: mol_type = other RNA
gtgtaagtcgggaatgtgaag

SEQ ID NO: 8766 - RNA, 21 nt, synthetic construct
  source 1..21: mol_type = other RNA
gtgtaccgcacctcccctccc

SEQ ID NO: 8767 - RNA, 21 nt, synthetic construct
  source 1..21: mol_type = other RNA
gtgtagagatgctgggtgtgc

SEQ ID NO: 8768 - RNA, 21 nt, synthetic construct
  source 1..21: mol_type = other RNA
gtgtaggaaagagccctggtt

SEQ ID NO: 8769 - RNA, 21 nt, synthetic construct
  source 1..21: mol_type = other RNA
gtgtagggttcgagcctggag

SEQ ID NO: 8770 - RNA, 21 nt, synthetic construct
  source 1..21: mol_type = other RNA
gtgtatttcgagcggagggca

SEQ ID NO: 8771 - RNA, 21 nt, synthetic construct
  source 1..21: mol_type = other RNA
gtgtcgaagacaagcaggcgg

SEQ ID NO: 8772 - RNA, 21 nt, synthetic construct
  source 1..21: mol_type = other RNA
gtgtcgttttacttgccttgg

SEQ ID NO: 8773 - RNA, 21 nt, synthetic construct
  source 1..21: mol_type = other RNA
gtgtctgagatagcctcgttg

SEQ ID NO: 8774 - RNA, 21 nt, synthetic construct
  source 1..21: mol_type = other RNA
gtgtctggccccgcgcccctg

SEQ ID NO: 8775 - RNA, 21 nt, synthetic construct
  source 1..21: mol_type = other RNA
gtgtgaaaacacaaatggcgt

SEQ ID NO: 8776 - RNA, 21 nt, synthetic construct
  source 1..21: mol_type = other RNA
gtgtgcaaggcggcgaggggg

SEQ ID NO: 8777 - RNA, 21 nt, synthetic construct
  source 1..21: mol_type = other RNA
gtgtgccacagcgtgtctgag

SEQ ID NO: 8778 - RNA, 21 nt, synthetic construct
  source 1..21: mol_type = other RNA
gtgtggtgggggtggcgaagg

SEQ ID NO: 8779 - RNA, 21 nt, synthetic construct
  source 1..21: mol_type = other RNA
gtgtgtgaaaacacaaatggc

SEQ ID NO: 8780 - RNA, 21 nt, synthetic construct
  source 1..21: mol_type = other RNA
gtgtgtgcaaggcggcgaggg

SEQ ID NO: 8781 - RNA, 21 nt, synthetic construct
  source 1..21: mol_type = other RNA
gtgttgcaacggtgtgtgcaa

SEQ ID NO: 8782 - RNA, 21 nt, synthetic construct
  source 1..21: mol_type = other RNA
gtgttggcggactggcgggac

SEQ ID NO: 8783 - RNA, 21 nt, synthetic construct
  source 1..21: mol_type = other RNA
gtgttttcacacacggcggga

SEQ ID NO: 8784 - RNA, 21 nt, synthetic construct
  source 1..21: mol_type = other RNA
gttaaactgttgggaaagccc

SEQ ID NO: 8785 - RNA, 21 nt, synthetic construct
  source 1..21: mol_type = other RNA
gttacgccgtcgggagtacgc

SEQ ID NO: 8786 - RNA, 21 nt, synthetic construct
  source 1..21: mol_type = other RNA
gttacgttgggagggaaaggg

SEQ ID NO: 8787 - RNA, 21 nt, synthetic construct
  source 1..21: mol_type = other RNA
gttaggcccaacgcggcgcca

SEQ ID NO: 8788 - RNA, 21 nt, synthetic construct
  source 1..21: mol_type = other RNA
gttcaagtaggtaaatcgcat

SEQ ID NO: 8789 - RNA, 21 nt, synthetic construct
  source 1..21: mol_type = other RNA
gttcccaccgcctgaagggcg

SEQ ID NO: 8790 - RNA, 21 nt, synthetic construct
  source 1..21: mol_type = other RNA
gttcccaggaaagggggtgaa

SEQ ID NO: 8791 - RNA, 21 nt, synthetic construct
  source 1..21: mol_type = other RNA
gttcccgacttcccacgggaa

SEQ ID NO: 8792 - RNA, 21 nt, synthetic construct
  source 1..21: mol_type = other RNA
gttccgctcccctacctagcc

SEQ ID NO: 8793 - RNA, 21 nt, synthetic construct
  source 1..21: mol_type = other RNA
gttcgagcctggagttgagcc

SEQ ID NO: 8794 - RNA, 21 nt, synthetic construct
  source 1..21: mol_type = other RNA
gttcggtctcttttctgtcgg

SEQ ID NO: 8795 - RNA, 21 nt, synthetic construct
  source 1..21: mol_type = other RNA
gttctccacgcccaaggcaag

SEQ ID NO: 8796 - RNA, 21 nt, synthetic construct
  source 1..21: mol_type = other RNA
gttctcgcggccttgtgacag

SEQ ID NO: 8797 - RNA, 21 nt, synthetic construct
  source 1..21: mol_type = other RNA
gttctctggctccccgtggcg

SEQ ID NO: 8798 - RNA, 21 nt, synthetic construct
  source 1..21: mol_type = other RNA
gttgaatgtgtagggttcgag

SEQ ID NO: 8799 - RNA, 21 nt, synthetic construct
  source 1..21: mol_type = other RNA
gttgagccagattgtgtcgtt

SEQ ID NO: 8800 - RNA, 21 nt, synthetic construct
  source 1..21: mol_type = other RNA
gttgcaacaccccattttccc

SEQ ID NO: 8801 - RNA, 21 nt, synthetic construct
  source 1..21: mol_type = other RNA
gttgcaacggtgtgtgcaagg

SEQ ID NO: 8802 - RNA, 21 nt, synthetic construct
  source 1..21: mol_type = other RNA
gttgccccctgggtggggcgg

SEQ ID NO: 8803 - RNA, 21 nt, synthetic construct
  source 1..21: mol_type = other RNA
gttgcctttcccgtgggaagt

SEQ ID NO: 8804 - RNA, 21 nt, synthetic construct
  source 1..21: mol_type = other RNA
gttgcgcaggggcgcggggcc

SEQ ID NO: 8805 - RNA, 21 nt, synthetic construct
  source 1..21: mol_type = other RNA
gttggagtaaagctcctgtca

SEQ ID NO: 8806 - RNA, 21 nt, synthetic construct
  source 1..21: mol_type = other RNA
gttggcggactggcgggactg

SEQ ID NO: 8807 - RNA, 21 nt, synthetic construct
  source 1..21: mol_type = other RNA
gttgggaaagccccttctatg

SEQ ID NO: 8808 - RNA, 21 nt, synthetic construct
  source 1..21: mol_type = other RNA
gttgggagggaaaggggtggc

SEQ ID NO: 8809 - RNA, 21 nt, synthetic construct
  source 1..21: mol_type = other RNA
gttgggcctaactcgagtcct

SEQ ID NO: 8810 - RNA, 21 nt, synthetic construct
  source 1..21: mol_type = other RNA
gttgggggaggggaagcgtcc

SEQ ID NO: 8811 - RNA, 21 nt, synthetic construct
  source 1..21: mol_type = other RNA
gttgggtcgcctagattagag

SEQ ID NO: 8812 - RNA, 21 nt, synthetic construct
  source 1..21: mol_type = other RNA
gttggtacggtcctccccgag

SEQ ID NO: 8813 - RNA, 21 nt, synthetic construct
  source 1..21: mol_type = other RNA
gttgtctgtcacaaggccgcg

SEQ ID NO: 8814 - RNA, 21 nt, synthetic construct
  source 1..21: mol_type = other RNA
gtttaactttccctctcatgc

SEQ ID NO: 8815 - RNA, 21 nt, synthetic construct
  source 1..21: mol_type = other RNA
gtttacccgccgcctgcttgt

SEQ ID NO: 8816 - RNA, 21 nt, synthetic construct
  source 1..21: mol_type = other RNA
gtttacctttcccttgaggag

SEQ ID NO: 8817 - RNA, 21 nt, synthetic construct
  source 1..21: mol_type = other RNA
gtttccgctcgggcagcgggc

SEQ ID NO: 8818 - RNA, 21 nt, synthetic construct
  source 1..21: mol_type = other RNA
gtttcctggccgggaatggcc

SEQ ID NO: 8819 - RNA, 21 nt, synthetic construct
  source 1..21: mol_type = other RNA
gtttcgagcattttccgctcc

SEQ ID NO: 8820 - RNA, 21 nt, synthetic construct
  source 1..21: mol_type = other RNA
gtttcgctcatgtgagactcg

SEQ ID NO: 8821 - RNA, 21 nt, synthetic construct
  source 1..21: mol_type = other RNA
gtttctcctcccgccgtgtgt

SEQ ID NO: 8822 - RNA, 21 nt, synthetic construct
  source 1..21: mol_type = other RNA
gtttgttacgttgggagggaa

SEQ ID NO: 8823 - RNA, 21 nt, synthetic construct
  source 1..21: mol_type = other RNA
gttttacttgccttgggcgtg

SEQ ID NO: 8824 - RNA, 21 nt, synthetic construct
  source 1..21: mol_type = other RNA
gttttcacacacggcgggagg

SEQ ID NO: 8825 - RNA, 21 nt, synthetic construct
  source 1..21: mol_type = other RNA
gttttctggcttcccacctca

SEQ ID NO: 8826 - RNA, 21 nt, synthetic construct
  source 1..21: mol_type = other RNA
gtttttcctgggtcaggacgc

SEQ ID NO: 8827 - RNA, 21 nt, synthetic construct
  source 1..21: mol_type = other RNA
taaaacgacacaatctggctc

SEQ ID NO: 8828 - RNA, 21 nt, synthetic construct
  source 1..21: mol_type = other RNA
taaaccgactcccccgaagga

SEQ ID NO: 8829 - RNA, 21 nt, synthetic construct
  source 1..21: mol_type = other RNA
taaacgtggagtaggcagttc

SEQ ID NO: 8830 - RNA, 21 nt, synthetic construct
  source 1..21: mol_type = other RNA
taaactgttgggaaagcccct

SEQ ID NO: 8831 - RNA, 21 nt, synthetic construct
  source 1..21: mol_type = other RNA
taaagctcctgtcagttacgc

SEQ ID NO: 8832 - RNA, 21 nt, synthetic construct
  source 1..21: mol_type = other RNA
taaagggaatatttttctgcc

SEQ ID NO: 8833 - RNA, 21 nt, synthetic construct
  source 1..21: mol_type = other RNA
taaatcgcatgagagggaaag

SEQ ID NO: 8834 - RNA, 21 nt, synthetic construct
  source 1..21: mol_type = other RNA
taacaaacattatgttcccga

SEQ ID NO: 8835 - RNA, 21 nt, synthetic construct
  source 1..21: mol_type = other RNA
taactcgagtcctgccgcctc

SEQ ID NO: 8836 - RNA, 21 nt, synthetic construct
  source 1..21: mol_type = other RNA
taactgacaggagctttactc

SEQ ID NO: 8837 - RNA, 21 nt, synthetic construct
  source 1..21: mol_type = other RNA
taactttccctctcatgcgat

SEQ ID NO: 8838 - RNA, 21 nt, synthetic construct
  source 1..21: mol_type = other RNA
taagagcttggggagggccag

SEQ ID NO: 8839 - RNA, 21 nt, synthetic construct
  source 1..21: mol_type = other RNA
taagcggctgcgtactcccga

SEQ ID NO: 8840 - RNA, 21 nt, synthetic construct
  source 1..21: mol_type = other RNA
taagggtccgacagaaaagag

SEQ ID NO: 8841 - RNA, 21 nt, synthetic construct
  source 1..21: mol_type = other RNA
taagtcgggaatgtgaagagg

SEQ ID NO: 8842 - RNA, 21 nt, synthetic construct
  source 1..21: mol_type = other RNA
taatctaggcgacccaactcc

SEQ ID NO: 8843 - RNA, 21 nt, synthetic construct
  source 1..21: mol_type = other RNA
taatcttcctggacgccttcc

SEQ ID NO: 8844 - RNA, 21 nt, synthetic construct
  source 1..21: mol_type = other RNA
taatgcctttgggaagcagcc

SEQ ID NO: 8845 - RNA, 21 nt, synthetic construct
  source 1..21: mol_type = other RNA
taatgtttgttacgttgggag

SEQ ID NO: 8846 - RNA, 21 nt, synthetic construct
  source 1..21: mol_type = other RNA
taattgattctatagagtcct

SEQ ID NO: 8847 - RNA, 21 nt, synthetic construct
  source 1..21: mol_type = other RNA
tacacattcaacgaggctatc

SEQ ID NO: 8848 - RNA, 21 nt, synthetic construct
  source 1..21: mol_type = other RNA
tacaccccacctacctacccg

SEQ ID NO: 8849 - RNA, 21 nt, synthetic construct
  source 1..21: mol_type = other RNA
tacacgcagagggaaagagaa

SEQ ID NO: 8850 - RNA, 21 nt, synthetic construct
  source 1..21: mol_type = other RNA
tacactcctcttcacattccc

SEQ ID NO: 8851 - RNA, 21 nt, synthetic construct
  source 1..21: mol_type = other RNA
tacactggggggatgggtggc

SEQ ID NO: 8852 - RNA, 21 nt, synthetic construct
  source 1..21: mol_type = other RNA
tacaggcactcgtgggggtgg

SEQ ID NO: 8853 - RNA, 21 nt, synthetic construct
  source 1..21: mol_type = other RNA
taccaacgcccgcctccccgc

SEQ ID NO: 8854 - RNA, 21 nt, synthetic construct
  source 1..21: mol_type = other RNA
tacccccgttctcgcggcctt

SEQ ID NO: 8855 - RNA, 21 nt, synthetic construct
  source 1..21: mol_type = other RNA
tacccgccccacccagggggc

SEQ ID NO: 8856 - RNA, 21 nt, synthetic construct
  source 1..21: mol_type = other RNA
tacccgccgcctgcttgtctt

SEQ ID NO: 8857 - RNA, 21 nt, synthetic construct
  source 1..21: mol_type = other RNA
tacccgtgaggtgggggtggg

SEQ ID NO: 8858 - RNA, 21 nt, synthetic construct
  source 1..21: mol_type = other RNA
taccgcacctcccctcccacc

SEQ ID NO: 8859 - RNA, 21 nt, synthetic construct
  source 1..21: mol_type = other RNA
tacctacccgccccacccagg

SEQ ID NO: 8860 - RNA, 21 nt, synthetic construct
  source 1..21: mol_type = other RNA
tacctacttgaaccagggctc

SEQ ID NO: 8861 - RNA, 21 nt, synthetic construct
  source 1..21: mol_type = other RNA
tacctagccgaggctctctga

SEQ ID NO: 8862 - RNA, 21 nt, synthetic construct
  source 1..21: mol_type = other RNA
taccttcgccacccccaccac

SEQ ID NO: 8863 - RNA, 21 nt, synthetic construct
  source 1..21: mol_type = other RNA
taccttgtcccaggcgctgcc

SEQ ID NO: 8864 - RNA, 21 nt, synthetic construct
  source 1..21: mol_type = other RNA
tacctttcccttgaggagagg

SEQ ID NO: 8865 - RNA, 21 nt, synthetic construct
  source 1..21: mol_type = other RNA
tacgcagccgcttagcgactc

SEQ ID NO: 8866 - RNA, 21 nt, synthetic construct
  source 1..21: mol_type = other RNA
tacgccatttgtgttttcaca

SEQ ID NO: 8867 - RNA, 21 nt, synthetic construct
  source 1..21: mol_type = other RNA
tacgccgtcgggagtacgcag

SEQ ID NO: 8868 - RNA, 21 nt, synthetic construct
  source 1..21: mol_type = other RNA
tacggaggggagatcgcggcc

SEQ ID NO: 8869 - RNA, 21 nt, synthetic construct
  source 1..21: mol_type = other RNA
tacgggccattcccggccagg

SEQ ID NO: 8870 - RNA, 21 nt, synthetic construct
  source 1..21: mol_type = other RNA
tacggtcctccccgaggccga

SEQ ID NO: 8871 - RNA, 21 nt, synthetic construct
  source 1..21: mol_type = other RNA
tacgttgggagggaaaggggt

SEQ ID NO: 8872 - RNA, 21 nt, synthetic construct
  source 1..21: mol_type = other RNA
tactccaaccagaatacgcca

SEQ ID NO: 8873 - RNA, 21 nt, synthetic construct
  source 1..21: mol_type = other RNA
tactccacgtttacctttccc

SEQ ID NO: 8874 - RNA, 21 nt, synthetic construct
  source 1..21: mol_type = other RNA
tactcccgacggcgtaactga

SEQ ID NO: 8875 - RNA, 21 nt, synthetic construct
  source 1..21: mol_type = other RNA
tactggctcgagtctcacatg

SEQ ID NO: 8876 - RNA, 21 nt, synthetic construct
  source 1..21: mol_type = other RNA
tactgtgttggcggactggcg

SEQ ID NO: 8877 - RNA, 21 nt, synthetic construct
  source 1..21: mol_type = other RNA
tacttgaaccagggctctttc

SEQ ID NO: 8878 - RNA, 21 nt, synthetic construct
  source 1..21: mol_type = other RNA
tacttgccttgggcgtggaga

SEQ ID NO: 8879 - RNA, 21 nt, synthetic construct
  source 1..21: mol_type = other RNA
tagaaggggctttcccaacag

SEQ ID NO: 8880 - RNA, 21 nt, synthetic construct
  source 1..21: mol_type = other RNA
tagaatcaattagcatagaag

SEQ ID NO: 8881 - RNA, 21 nt, synthetic construct
  source 1..21: mol_type = other RNA
tagagaagaggctgtgcttcg

SEQ ID NO: 8882 - RNA, 21 nt, synthetic construct
  source 1..21: mol_type = other RNA
tagagatgctgggtgtgcggg

SEQ ID NO: 8883 - RNA, 21 nt, synthetic construct
  source 1..21: mol_type = other RNA
tagagggggatctctctccct

SEQ ID NO: 8884 - RNA, 21 nt, synthetic construct
  source 1..21: mol_type = other RNA
tagagtccttgcttgtctcac

SEQ ID NO: 8885 - RNA, 21 nt, synthetic construct
  source 1..21: mol_type = other RNA
tagattagagggggatctctc

SEQ ID NO: 8886 - RNA, 21 nt, synthetic construct
  source 1..21: mol_type = other RNA
tagcaagggcccggtcccaca

SEQ ID NO: 8887 - RNA, 21 nt, synthetic construct
  source 1..21: mol_type = other RNA
tagcaggtcgggcttgtctcg

SEQ ID NO: 8888 - RNA, 21 nt, synthetic construct
  source 1..21: mol_type = other RNA
tagcatagaaggggctttccc

SEQ ID NO: 8889 - RNA, 21 nt, synthetic construct
  source 1..21: mol_type = other RNA
tagccacccatccccccagtg

SEQ ID NO: 8890 - RNA, 21 nt, synthetic construct
  source 1..21: mol_type = other RNA
tagccgaggctctctgaggag

SEQ ID NO: 8891 - RNA, 21 nt, synthetic construct
  source 1..21: mol_type = other RNA
tagccggaagcgctcctccct

SEQ ID NO: 8892 - RNA, 21 nt, synthetic construct
  source 1..21: mol_type = other RNA
tagcctcgttgaatgtgtagg

SEQ ID NO: 8893 - RNA, 21 nt, synthetic construct
  source 1..21: mol_type = other RNA
tagcctcttgtcgccgattgg

SEQ ID NO: 8894 - RNA, 21 nt, synthetic construct
  source 1..21: mol_type = other RNA
tagcgactctcgcgttgcccc

SEQ ID NO: 8895 - RNA, 21 nt, synthetic construct
  source 1..21: mol_type = other RNA
taggaaagagccctggttcaa

SEQ ID NO: 8896 - RNA, 21 nt, synthetic construct
  source 1..21: mol_type = other RNA
taggaggatgctgccacttct

SEQ ID NO: 8897 - RNA, 21 nt, synthetic construct
  source 1..21: mol_type = other RNA
taggcagttcccaggaaaggg

SEQ ID NO: 8898 - RNA, 21 nt, synthetic construct
  source 1..21: mol_type = other RNA
taggcccaacgcggcgccacg

SEQ ID NO: 8899 - RNA, 21 nt, synthetic construct
  source 1..21: mol_type = other RNA
taggcgacccaactccccctt

SEQ ID NO: 8900 - RNA, 21 nt, synthetic construct
  source 1..21: mol_type = other RNA
taggcggccccggcggcttcc

SEQ ID NO: 8901 - RNA, 21 nt, synthetic construct
  source 1..21: mol_type = other RNA
tagggagtgggggatcgggga

SEQ ID NO: 8902 - RNA, 21 nt, synthetic construct
  source 1..21: mol_type = other RNA
taggggagcggaactctggtg

SEQ ID NO: 8903 - RNA, 21 nt, synthetic construct
  source 1..21: mol_type = other RNA
taggggggccgtctggtggct

SEQ ID NO: 8904 - RNA, 21 nt, synthetic construct
  source 1..21: mol_type = other RNA
tagggttcgagcctggagttg

SEQ ID NO: 8905 - RNA, 21 nt, synthetic construct
  source 1..21: mol_type = other RNA
taggtaaatcgcatgagaggg

SEQ ID NO: 8906 - RNA, 21 nt, synthetic construct
  source 1..21: mol_type = other RNA
taggtaggggagcggaactct

SEQ ID NO: 8907 - RNA, 21 nt, synthetic construct
  source 1..21: mol_type = other RNA
taggtaggtggggtgtagaga

SEQ ID NO: 8908 - RNA, 21 nt, synthetic construct
  source 1..21: mol_type = other RNA
taggtggggtgtagagatgct

SEQ ID NO: 8909 - RNA, 21 nt, synthetic construct
  source 1..21: mol_type = other RNA
tagtgccggcccccctctttc

SEQ ID NO: 8910 - RNA, 21 nt, synthetic construct
  source 1..21: mol_type = other RNA
tatagaatcaattagcataga

SEQ ID NO: 8911 - RNA, 21 nt, synthetic construct
  source 1..21: mol_type = other RNA
tatagagtccttgcttgtctc

SEQ ID NO: 8912 - RNA, 21 nt, synthetic construct
  source 1..21: mol_type = other RNA
tatccaagagaaagaccactg

SEQ ID NO: 8913 - RNA, 21 nt, synthetic construct
  source 1..21: mol_type = other RNA
tatctcagacacgctgtggca

SEQ ID NO: 8914 - RNA, 21 nt, synthetic construct
  source 1..21: mol_type = other RNA
tatcttcaaaggcagaaaaat

SEQ ID NO: 8915 - RNA, 21 nt, synthetic construct
  source 1..21: mol_type = other RNA
tatgaattctctttccctctg

SEQ ID NO: 8916 - RNA, 21 nt, synthetic construct
  source 1..21: mol_type = other RNA
tatgcctgtgtatttcgagcg

SEQ ID NO: 8917 - RNA, 21 nt, synthetic construct
  source 1..21: mol_type = other RNA
tatgctaattgattctataga

SEQ ID NO: 8918 - RNA, 21 nt, synthetic construct
  source 1..21: mol_type = other RNA
tatgttcccgacttcccacgg

SEQ ID NO: 8919 - RNA, 21 nt, synthetic construct
  source 1..21: mol_type = other RNA
tattccctttatgaattctct

SEQ ID NO: 8920 - RNA, 21 nt, synthetic construct
  source 1..21: mol_type = other RNA
tattctcacaagatcgttctc

SEQ ID NO: 8921 - RNA, 21 nt, synthetic construct
  source 1..21: mol_type = other RNA
tattctggttggagtaaagct

SEQ ID NO: 8922 - RNA, 21 nt, synthetic construct
  source 1..21: mol_type = other RNA
tatttcgagcggagggcagca

SEQ ID NO: 8923 - RNA, 21 nt, synthetic construct
  source 1..21: mol_type = other RNA
tatttttctgcctttgaagat

SEQ ID NO: 8924 - RNA, 21 nt, synthetic construct
  source 1..21: mol_type = other RNA
tcaaaggcagaaaaatattcc

SEQ ID NO: 8925 - RNA, 21 nt, synthetic construct
  source 1..21: mol_type = other RNA
tcaacgaggctatctcagaca

SEQ ID NO: 8926 - RNA, 21 nt, synthetic construct
  source 1..21: mol_type = other RNA
tcaactccaggctcgaaccct

SEQ ID NO: 8927 - RNA, 21 nt, synthetic construct
  source 1..21: mol_type = other RNA
tcaagggaaaggtaaacgtgg

SEQ ID NO: 8928 - RNA, 21 nt, synthetic construct
  source 1..21: mol_type = other RNA
tcaagtaggtaaatcgcatga

SEQ ID NO: 8929 - RNA, 21 nt, synthetic construct
  source 1..21: mol_type = other RNA
tcaattagcatagaaggggct

SEQ ID NO: 8930 - RNA, 21 nt, synthetic construct
  source 1..21: mol_type = other RNA
tcacaagatcgttctccacgc

SEQ ID NO: 8931 - RNA, 21 nt, synthetic construct
  source 1..21: mol_type = other RNA
tcacaaggccgcgagaacggg

SEQ ID NO: 8932 - RNA, 21 nt, synthetic construct
  source 1..21: mol_type = other RNA
tcacacacggcgggaggagaa

SEQ ID NO: 8933 - RNA, 21 nt, synthetic construct
  source 1..21: mol_type = other RNA
tcacatgagcgaaaccactgc

SEQ ID NO: 8934 - RNA, 21 nt, synthetic construct
  source 1..21: mol_type = other RNA
tcacattcccgacttacacgc

SEQ ID NO: 8935 - RNA, 21 nt, synthetic construct
  source 1..21: mol_type = other RNA
tcacccccctcgccgccttgc

SEQ ID NO: 8936 - RNA, 21 nt, synthetic construct
  source 1..21: mol_type = other RNA
tcaccccctttcctgggaact

SEQ ID NO: 8937 - RNA, 21 nt, synthetic construct
  source 1..21: mol_type = other RNA
tcacctcctccgtctccccgc

SEQ ID NO: 8938 - RNA, 21 nt, synthetic construct
  source 1..21: mol_type = other RNA
tcacgatcgggccccagggga

SEQ ID NO: 8939 - RNA, 21 nt, synthetic construct
  source 1..21: mol_type = other RNA
tcacgcagccccagtcccgcc

SEQ ID NO: 8940 - RNA, 21 nt, synthetic construct
  source 1..21: mol_type = other RNA
tcacgggtacgggccattccc

SEQ ID NO: 8941 - RNA, 21 nt, synthetic construct
  source 1..21: mol_type = other RNA
tcactcagcccgctgcccgag

SEQ ID NO: 8942 - RNA, 21 nt, synthetic construct
  source 1..21: mol_type = other RNA
tcactgaccctcccctcccgc

SEQ ID NO: 8943 - RNA, 21 nt, synthetic construct
  source 1..21: mol_type = other RNA
tcacttcttgggcgtcagtgg

SEQ ID NO: 8944 - RNA, 21 nt, synthetic construct
  source 1..21: mol_type = other RNA
tcagacacgctgtggcacacg

SEQ ID NO: 8945 - RNA, 21 nt, synthetic construct
  source 1..21: mol_type = other RNA
tcagagactcacgcagcccca

SEQ ID NO: 8946 - RNA, 21 nt, synthetic construct
  source 1..21: mol_type = other RNA
tcagagagcctcggctaggta

SEQ ID NO: 8947 - RNA, 21 nt, synthetic construct
  source 1..21: mol_type = other RNA
tcagagttgtctgtcacaagg

SEQ ID NO: 8948 - RNA, 21 nt, synthetic construct
  source 1..21: mol_type = other RNA
tcagatggctgcttcccaaag

SEQ ID NO: 8949 - RNA, 21 nt, synthetic construct
  source 1..21: mol_type = other RNA
tcagcccgctgcccgagcgga

SEQ ID NO: 8950 - RNA, 21 nt, synthetic construct
  source 1..21: mol_type = other RNA
tcagcggaagccgccggggcc

SEQ ID NO: 8951 - RNA, 21 nt, synthetic construct
  source 1..21: mol_type = other RNA
tcaggacgcttcccctccccc

SEQ ID NO: 8952 - RNA, 21 nt, synthetic construct
  source 1..21: mol_type = other RNA
tcaggcggtgggaacccgggg

SEQ ID NO: 8953 - RNA, 21 nt, synthetic construct
  source 1..21: mol_type = other RNA
tcaggtgtcgaagacaagcag

SEQ ID NO: 8954 - RNA, 21 nt, synthetic construct
  source 1..21: mol_type = other RNA
tcagtgaaatcggctctggcg

SEQ ID NO: 8955 - RNA, 21 nt, synthetic construct
  source 1..21: mol_type = other RNA
tcagtggcgtttccgctcggg

SEQ ID NO: 8956 - RNA, 21 nt, synthetic construct
  source 1..21: mol_type = other RNA
tcagtggtctttctcttggat

SEQ ID NO: 8957 - RNA, 21 nt, synthetic construct
  source 1..21: mol_type = other RNA
tcagttacgccgtcgggagta

SEQ ID NO: 8958 - RNA, 21 nt, synthetic construct
  source 1..21: mol_type = other RNA
tcataaagggaatatttttct

SEQ ID NO: 8959 - RNA, 21 nt, synthetic construct
  source 1..21: mol_type = other RNA
tcatgcgatttacctacttga

SEQ ID NO: 8960 - RNA, 21 nt, synthetic construct
  source 1..21: mol_type = other RNA
tcatgtgagactcgagccagt

SEQ ID NO: 8961 - RNA, 21 nt, synthetic construct
  source 1..21: mol_type = other RNA
tcatgtttttcctgggtcagg

SEQ ID NO: 8962 - RNA, 21 nt, synthetic construct
  source 1..21: mol_type = other RNA
tccaaccagaatacgccattt

SEQ ID NO: 8963 - RNA, 21 nt, synthetic construct
  source 1..21: mol_type = other RNA
tccaagagaaagaccactgac

SEQ ID NO: 8964 - RNA, 21 nt, synthetic construct
  source 1..21: mol_type = other RNA
tccacgcccaaggcaagtaaa

SEQ ID NO: 8965 - RNA, 21 nt, synthetic construct
  source 1..21: mol_type = other RNA
tccacgtttacctttcccttg

SEQ ID NO: 8966 - RNA, 21 nt, synthetic construct
  source 1..21: mol_type = other RNA
tccagaagtctcggccggcag

SEQ ID NO: 8967 - RNA, 21 nt, synthetic construct
  source 1..21: mol_type = other RNA
tccagccacccctttccctcc

SEQ ID NO: 8968 - RNA, 21 nt, synthetic construct
  source 1..21: mol_type = other RNA
tccagcgcgcgcttcctgcca

SEQ ID NO: 8969 - RNA, 21 nt, synthetic construct
  source 1..21: mol_type = other RNA
tccaggaagattacggagggg

SEQ ID NO: 8970 - RNA, 21 nt, synthetic construct
  source 1..21: mol_type = other RNA
tccaggctcgaaccctacaca

SEQ ID NO: 8971 - RNA, 21 nt, synthetic construct
  source 1..21: mol_type = other RNA
tccatatccaagagaaagacc

SEQ ID NO: 8972 - RNA, 21 nt, synthetic construct
  source 1..21: mol_type = other RNA
tcccaaaggcattaccttcgc

SEQ ID NO: 8973 - RNA, 21 nt, synthetic construct
  source 1..21: mol_type = other RNA
tcccaacagtttaactttccc

SEQ ID NO: 8974 - RNA, 21 nt, synthetic construct
  source 1..21: mol_type = other RNA
tcccaacgtaacaaacattat

SEQ ID NO: 8975 - RNA, 21 nt, synthetic construct
  source 1..21: mol_type = other RNA
tcccacagcttcgacagccaa

SEQ ID NO: 8976 - RNA, 21 nt, synthetic construct
  source 1..21: mol_type = other RNA
tcccaccagagttccgctccc

SEQ ID NO: 8977 - RNA, 21 nt, synthetic construct
  source 1..21: mol_type = other RNA
tcccaccctccccttccttcg

SEQ ID NO: 8978 - RNA, 21 nt, synthetic construct
  source 1..21: mol_type = other RNA
tcccaccgcctgaagggcgag

SEQ ID NO: 8979 - RNA, 21 nt, synthetic construct
  source 1..21: mol_type = other RNA
tcccacctcagatggctgctt

SEQ ID NO: 8980 - RNA, 21 nt, synthetic construct
  source 1..21: mol_type = other RNA
tcccacgggaaaggcaacccc

SEQ ID NO: 8981 - RNA, 21 nt, synthetic construct
  source 1..21: mol_type = other RNA
tcccaggaaagggggtgaaga

SEQ ID NO: 8982 - RNA, 21 nt, synthetic construct
  source 1..21: mol_type = other RNA
tcccagggagagagatccccc

SEQ ID NO: 8983 - RNA, 21 nt, synthetic construct
  source 1..21: mol_type = other RNA
tccccaagctcttaggaggat

SEQ ID NO: 8984 - RNA, 21 nt, synthetic construct
  source 1..21: mol_type = other RNA
tcccccaacgcctcttcaccc

SEQ ID NO: 8985 - RNA, 21 nt, synthetic construct
  source 1..21: mol_type = other RNA
tcccccacccccacgagtgcc

SEQ ID NO: 8986 - RNA, 21 nt, synthetic construct
  source 1..21: mol_type = other RNA
tcccccactccctacccccgt

SEQ ID NO: 8987 - RNA, 21 nt, synthetic construct
  source 1..21: mol_type = other RNA
tccccccagtgtaccgcacct

SEQ ID NO: 8988 - RNA, 21 nt, synthetic construct
  source 1..21: mol_type = other RNA
tcccccgaaggaaggggaggg

SEQ ID NO: 8989 - RNA, 21 nt, synthetic construct
  source 1..21: mol_type = other RNA
tccccctccggttgccgcagg

SEQ ID NO: 8990 - RNA, 21 nt, synthetic construct
  source 1..21: mol_type = other RNA
tccccctctaatctaggcgac

SEQ ID NO: 8991 - RNA, 21 nt, synthetic construct
  source 1..21: mol_type = other RNA
tccccctttcatgtttttcct

SEQ ID NO: 8992 - RNA, 21 nt, synthetic construct
  source 1..21: mol_type = other RNA
tccccgaggccgagcgccgca

SEQ ID NO: 8993 - RNA, 21 nt, synthetic construct
  source 1..21: mol_type = other RNA
tccccgatcccccactcccta

SEQ ID NO: 8994 - RNA, 21 nt, synthetic construct
  source 1..21: mol_type = other RNA
tccccgcctttggctcgctcc

SEQ ID NO: 8995 - RNA, 21 nt, synthetic construct
  source 1..21: mol_type = other RNA
tccccgcgctcgctctccttg

SEQ ID NO: 8996 - RNA, 21 nt, synthetic construct
  source 1..21: mol_type = other RNA
tccccgtgcggtcagtggcgt

SEQ ID NO: 8997 - RNA, 21 nt, synthetic construct
  source 1..21: mol_type = other RNA
tccccgtggcgtgtgccacag

SEQ ID NO: 8998 - RNA, 21 nt, synthetic construct
  source 1..21: mol_type = other RNA
tcccctacctagccgaggctc

SEQ ID NO: 8999 - RNA, 21 nt, synthetic construct
  source 1..21: mol_type = other RNA
tcccctcccaccagagttccg

SEQ ID NO: 9000 - RNA, 21 nt, synthetic construct
  source 1..21: mol_type = other RNA
tcccctcccccaacgcctctt

SEQ ID NO: 9001 - RNA, 21 nt, synthetic construct
  source 1..21: mol_type = other RNA
tcccctccgtaatcttcctgg

SEQ ID NO: 9002 - RNA, 21 nt, synthetic construct
  source 1..21: mol_type = other RNA
tcccctggggcccgatcgtga

SEQ ID NO: 9003 - RNA, 21 nt, synthetic construct
  source 1..21: mol_type = other RNA
tccccttccttcgggggagtc

SEQ ID NO: 9004 - RNA, 21 nt, synthetic construct
  source 1..21: mol_type = other RNA
tcccgacggcgtaactgacag

SEQ ID NO: 9005 - RNA, 21 nt, synthetic construct
  source 1..21: mol_type = other RNA
tcccgacttacacgcagaggg

SEQ ID NO: 9006 - RNA, 21 nt, synthetic construct
  source 1..21: mol_type = other RNA
tcccgacttcccacgggaaag

SEQ ID NO: 9007 - RNA, 21 nt, synthetic construct
  source 1..21: mol_type = other RNA
tcccgccagtccgccaacaca

SEQ ID NO: 9008 - RNA, 21 nt, synthetic construct
  source 1..21: mol_type = other RNA
tcccgccgcgccattggcctc

SEQ ID NO: 9009 - RNA, 21 nt, synthetic construct
  source 1..21: mol_type = other RNA
tcccgccgtgtgtgaaaacac

SEQ ID NO: 9010 - RNA, 21 nt, synthetic construct
  source 1..21: mol_type = other RNA
tcccgcctgcatccagccacc

SEQ ID NO: 9011 - RNA, 21 nt, synthetic construct
  source 1..21: mol_type = other RNA
tcccggccaggaaacgccgtg

SEQ ID NO: 9012 - RNA, 21 nt, synthetic construct
  source 1..21: mol_type = other RNA
tcccgggaggcggcaggactc

SEQ ID NO: 9013 - RNA, 21 nt, synthetic construct
  source 1..21: mol_type = other RNA
tcccgtgggaagtcgggaaca

SEQ ID NO: 9014 - RNA, 21 nt, synthetic construct
  source 1..21: mol_type = other RNA
tccctacccccgttctcgcgg

SEQ ID NO: 9015 - RNA, 21 nt, synthetic construct
  source 1..21: mol_type = other RNA
tccctcccaacgtaacaaaca

SEQ ID NO: 9016 - RNA, 21 nt, synthetic construct
  source 1..21: mol_type = other RNA
tccctccccctccggttgccg

SEQ ID NO: 9017 - RNA, 21 nt, synthetic construct
  source 1..21: mol_type = other RNA
tccctcccctggggcccgatc

SEQ ID NO: 9018 - RNA, 21 nt, synthetic construct
  source 1..21: mol_type = other RNA
tccctcccgcctgcatccagc

SEQ ID NO: 9019 - RNA, 21 nt, synthetic construct
  source 1..21: mol_type = other RNA
tccctctcatgcgatttacct

SEQ ID NO: 9020 - RNA, 21 nt, synthetic construct
  source 1..21: mol_type = other RNA
tccctctcgttttctggcttc

SEQ ID NO: 9021 - RNA, 21 nt, synthetic construct
  source 1..21: mol_type = other RNA
tccctctgcgagagcaatggc

SEQ ID NO: 9022 - RNA, 21 nt, synthetic construct
  source 1..21: mol_type = other RNA
tccctctgcgtgtaagtcggg

SEQ ID NO: 9023 - RNA, 21 nt, synthetic construct
  source 1..21: mol_type = other RNA
tccctgggaaaatggggtgtt

SEQ ID NO: 9024 - RNA, 21 nt, synthetic construct
  source 1..21: mol_type = other RNA
tcccttctccctccccctccg

SEQ ID NO: 9025 - RNA, 21 nt, synthetic construct
  source 1..21: mol_type = other RNA
tcccttgaggagaggcctctt

SEQ ID NO: 9026 - RNA, 21 nt, synthetic construct
  source 1..21: mol_type = other RNA
tccctttatgaattctctttc

SEQ ID NO: 9027 - RNA, 21 nt, synthetic construct
  source 1..21: mol_type = other RNA
tccgacagaaaagagaccgaa

SEQ ID NO: 9028 - RNA, 21 nt, synthetic construct
  source 1..21: mol_type = other RNA
tccgccaacacagtagtgccg

SEQ ID NO: 9029 - RNA, 21 nt, synthetic construct
  source 1..21: mol_type = other RNA
tccgcccaccgccccgcaccc

SEQ ID NO: 9030 - RNA, 21 nt, synthetic construct
  source 1..21: mol_type = other RNA
tccgccccgggttcccaccgc

SEQ ID NO: 9031 - RNA, 21 nt, synthetic construct
  source 1..21: mol_type = other RNA
tccgcctttctgccccccacc

SEQ ID NO: 9032 - RNA, 21 nt, synthetic construct
  source 1..21: mol_type = other RNA
tccgctcccctacctagccga

SEQ ID NO: 9033 - RNA, 21 nt, synthetic construct
  source 1..21: mol_type = other RNA
tccgctcccttctccctcccc

SEQ ID NO: 9034 - RNA, 21 nt, synthetic construct
  source 1..21: mol_type = other RNA
tccgctcgaaatacacaggca

SEQ ID NO: 9035 - RNA, 21 nt, synthetic construct
  source 1..21: mol_type = other RNA
tccgctcgggcagcgggctga

SEQ ID NO: 9036 - RNA, 21 nt, synthetic construct
  source 1..21: mol_type = other RNA
tccgctgattggcggcgagtg

SEQ ID NO: 9037 - RNA, 21 nt, synthetic construct
  source 1..21: mol_type = other RNA
tccggctagcctcttgtcgcc

SEQ ID NO: 9038 - RNA, 21 nt, synthetic construct
  source 1..21: mol_type = other RNA
tccggctcctcagagagcctc

SEQ ID NO: 9039 - RNA, 21 nt, synthetic construct
  source 1..21: mol_type = other RNA
tccggttgccgcagggcgggc

SEQ ID NO: 9040 - RNA, 21 nt, synthetic construct
  source 1..21: mol_type = other RNA
tccggtttcgagcattttccg

SEQ ID NO: 9041 - RNA, 21 nt, synthetic construct
  source 1..21: mol_type = other RNA
tccgtaatcttcctggacgcc

SEQ ID NO: 9042 - RNA, 21 nt, synthetic construct
  source 1..21: mol_type = other RNA
tccgtccggtttcgagcattt

SEQ ID NO: 9043 - RNA, 21 nt, synthetic construct
  source 1..21: mol_type = other RNA
tccgtctccccgcgctcgctc

SEQ ID NO: 9044 - RNA, 21 nt, synthetic construct
  source 1..21: mol_type = other RNA
tcctaagagcttggggagggc

SEQ ID NO: 9045 - RNA, 21 nt, synthetic construct
  source 1..21: mol_type = other RNA
tcctacactcctcttcacatt

SEQ ID NO: 9046 - RNA, 21 nt, synthetic construct
  source 1..21: mol_type = other RNA
tcctcaagggaaaggtaaacg

SEQ ID NO: 9047 - RNA, 21 nt, synthetic construct
  source 1..21: mol_type = other RNA
tcctcagagagcctcggctag

SEQ ID NO: 9048 - RNA, 21 nt, synthetic construct
  source 1..21: mol_type = other RNA
tcctcccaccctccccttcct

SEQ ID NO: 9049 - RNA, 21 nt, synthetic construct
  source 1..21: mol_type = other RNA
tcctcccccacccccacgagt

SEQ ID NO: 9050 - RNA, 21 nt, synthetic construct
  source 1..21: mol_type = other RNA
tcctccccgaggccgagcgcc

SEQ ID NO: 9051 - RNA, 21 nt, synthetic construct
  source 1..21: mol_type = other RNA
tcctcccgccgtgtgtgaaaa

SEQ ID NO: 9052 - RNA, 21 nt, synthetic construct
  source 1..21: mol_type = other RNA
tcctccctctgcgagagcaat

SEQ ID NO: 9053 - RNA, 21 nt, synthetic construct
  source 1..21: mol_type = other RNA
tcctccgtctccccgcgctcg

SEQ ID NO: 9054 - RNA, 21 nt, synthetic construct
  source 1..21: mol_type = other RNA
tcctcctaagagcttggggag

SEQ ID NO: 9055 - RNA, 21 nt, synthetic construct
  source 1..21: mol_type = other RNA
tcctcttcacattcccgactt

SEQ ID NO: 9056 - RNA, 21 nt, synthetic construct
  source 1..21: mol_type = other RNA
tcctgacccaggaaaaacatg

SEQ ID NO: 9057 - RNA, 21 nt, synthetic construct
  source 1..21: mol_type = other RNA
tcctgccacgttgcgcagggg

SEQ ID NO: 9058 - RNA, 21 nt, synthetic construct
  source 1..21: mol_type = other RNA
tcctgccgcctcccgggagtg

SEQ ID NO: 9059 - RNA, 21 nt, synthetic construct
  source 1..21: mol_type = other RNA
tcctgcggcgggaggggaggg

SEQ ID NO: 9060 - RNA, 21 nt, synthetic construct
  source 1..21: mol_type = other RNA
tcctggacgccttccctctcg

SEQ ID NO: 9061 - RNA, 21 nt, synthetic construct
  source 1..21: mol_type = other RNA
tcctggccgggaatggcccgt

SEQ ID NO: 9062 - RNA, 21 nt, synthetic construct
  source 1..21: mol_type = other RNA
tcctgggaactgcctactcca

SEQ ID NO: 9063 - RNA, 21 nt, synthetic construct
  source 1..21: mol_type = other RNA
tcctgggtcaggacgcttccc

SEQ ID NO: 9064 - RNA, 21 nt, synthetic construct
  source 1..21: mol_type = other RNA
tcctgtcagttacgccgtcgg

SEQ ID NO: 9065 - RNA, 21 nt, synthetic construct
  source 1..21: mol_type = other RNA
tccttcgggggagtcggttta

SEQ ID NO: 9066 - RNA, 21 nt, synthetic construct
  source 1..21: mol_type = other RNA
tccttgcttgtctcacttctt

SEQ ID NO: 9067 - RNA, 21 nt, synthetic construct
  source 1..21: mol_type = other RNA
tccttgggtcgtgggcctggc

SEQ ID NO: 9068 - RNA, 21 nt, synthetic construct
  source 1..21: mol_type = other RNA
tcgaaaccggacggagccatt

SEQ ID NO: 9069 - RNA, 21 nt, synthetic construct
  source 1..21: mol_type = other RNA
tcgaaccctacacattcaacg

SEQ ID NO: 9070 - RNA, 21 nt, synthetic construct
  source 1..21: mol_type = other RNA
tcgaagacaagcaggcggcgg

SEQ ID NO: 9071 - RNA, 21 nt, synthetic construct
  source 1..21: mol_type = other RNA
tcgaagctgtgggaccgggcc

SEQ ID NO: 9072 - RNA, 21 nt, synthetic construct
  source 1..21: mol_type = other RNA
tcgacacctgattggctgtcg

SEQ ID NO: 9073 - RNA, 21 nt, synthetic construct
  source 1..21: mol_type = other RNA
tcgacagccaatcaggtgtcg

SEQ ID NO: 9074 - RNA, 21 nt, synthetic construct
  source 1..21: mol_type = other RNA
tcgagcattttccgctccctt

SEQ ID NO: 9075 - RNA, 21 nt, synthetic construct
  source 1..21: mol_type = other RNA
tcgagccagtagcaagggccc

SEQ ID NO: 9076 - RNA, 21 nt, synthetic construct
  source 1..21: mol_type = other RNA
tcgagcctggagttgagccag

SEQ ID NO: 9077 - RNA, 21 nt, synthetic construct
  source 1..21: mol_type = other RNA
tcgagcggagggcagcaagag

SEQ ID NO: 9078 - RNA, 21 nt, synthetic construct
  source 1..21: mol_type = other RNA
tcgagtcctgccgcctcccgg

SEQ ID NO: 9079 - RNA, 21 nt, synthetic construct
  source 1..21: mol_type = other RNA
tcgagtctcacatgagcgaaa

SEQ ID NO: 9080 - RNA, 21 nt, synthetic construct
  source 1..21: mol_type = other RNA
tcgagttaggcccaacgcggc

SEQ ID NO: 9081 - RNA, 21 nt, synthetic construct
  source 1..21: mol_type = other RNA
tcgcagagggaggagcgcttc

SEQ ID NO: 9082 - RNA, 21 nt, synthetic construct
  source 1..21: mol_type = other RNA
tcgcatgagagggaaagttaa

SEQ ID NO: 9083 - RNA, 21 nt, synthetic construct
  source 1..21: mol_type = other RNA
tcgccacccccaccacacgtt

SEQ ID NO: 9084 - RNA, 21 nt, synthetic construct
  source 1..21: mol_type = other RNA
tcgcccttcaggcggtgggaa

SEQ ID NO: 9085 - RNA, 21 nt, synthetic construct
  source 1..21: mol_type = other RNA
tcgccgattggccgtttctcc

SEQ ID NO: 9086 - RNA, 21 nt, synthetic construct
  source 1..21: mol_type = other RNA
tcgccgccaatcagcggaagc

SEQ ID NO: 9087 - RNA, 21 nt, synthetic construct
  source 1..21: mol_type = other RNA
tcgccgccttgcacacaccgt

SEQ ID NO: 9088 - RNA, 21 nt, synthetic construct
  source 1..21: mol_type = other RNA
tcgcctagattagagggggat

SEQ ID NO: 9089 - RNA, 21 nt, synthetic construct
  source 1..21: mol_type = other RNA
tcgcggcccccagagcgatca

SEQ ID NO: 9090 - RNA, 21 nt, synthetic construct
  source 1..21: mol_type = other RNA
tcgcggccttgtgacagacaa

SEQ ID NO: 9091 - RNA, 21 nt, synthetic construct
  source 1..21: mol_type = other RNA
tcgcgttgccccctgggtggg

SEQ ID NO: 9092 - RNA, 21 nt, synthetic construct
  source 1..21: mol_type = other RNA
tcgctaagcggctgcgtactc

SEQ ID NO: 9093 - RNA, 21 nt, synthetic construct
  source 1..21: mol_type = other RNA
tcgctcatgtgagactcgagc

SEQ ID NO: 9094 - RNA, 21 nt, synthetic construct
  source 1..21: mol_type = other RNA
tcgctccgcctttctgccccc

SEQ ID NO: 9095 - RNA, 21 nt, synthetic construct
  source 1..21: mol_type = other RNA
tcgctctccttgggtcgtggg

SEQ ID NO: 9096 - RNA, 21 nt, synthetic construct
  source 1..21: mol_type = other RNA
tcgctctgggggccgcgatct

SEQ ID NO: 9097 - RNA, 21 nt, synthetic construct
  source 1..21: mol_type = other RNA
tcggacccttaccttgtccca

SEQ ID NO: 9098 - RNA, 21 nt, synthetic construct
  source 1..21: mol_type = other RNA
tcggcctcggggaggaccgta

SEQ ID NO: 9099 - RNA, 21 nt, synthetic construct
  source 1..21: mol_type = other RNA
tcggcgacaagaggctagccg

SEQ ID NO: 9100 - RNA, 21 nt, synthetic construct
  source 1..21: mol_type = other RNA
tcggcgctccggctcctcaga

SEQ ID NO: 9101 - RNA, 21 nt, synthetic construct
  source 1..21: mol_type = other RNA
tcggctaggtaggggagcgga

SEQ ID NO: 9102 - RNA, 21 nt, synthetic construct
  source 1..21: mol_type = other RNA
tcggctctggcgcgggcgtcc

SEQ ID NO: 9103 - RNA, 21 nt, synthetic construct
  source 1..21: mol_type = other RNA
tcgggaacataatgtttgtta

SEQ ID NO: 9104 - RNA, 21 nt, synthetic construct
  source 1..21: mol_type = other RNA
tcgggaatgtgaagaggagtg

SEQ ID NO: 9105 - RNA, 21 nt, synthetic construct
  source 1..21: mol_type = other RNA
tcgggagtacgcagccgctta

SEQ ID NO: 9106 - RNA, 21 nt, synthetic construct
  source 1..21: mol_type = other RNA
tcgggcagcgggctgagtgag

SEQ ID NO: 9107 - RNA, 21 nt, synthetic construct
  source 1..21: mol_type = other RNA
tcgggccccaggggagggaag

SEQ ID NO: 9108 - RNA, 21 nt, synthetic construct
  source 1..21: mol_type = other RNA
tcgggcttgtctcgcccttca

SEQ ID NO: 9109 - RNA, 21 nt, synthetic construct
  source 1..21: mol_type = other RNA
tcggggaggaccgtaccaacg

SEQ ID NO: 9110 - RNA, 21 nt, synthetic construct
  source 1..21: mol_type = other RNA
tcgggggagtcggtttacccg

SEQ ID NO: 9111 - RNA, 21 nt, synthetic construct
  source 1..21: mol_type = other RNA
tcggtctcttttctgtcggac

SEQ ID NO: 9112 - RNA, 21 nt, synthetic construct
  source 1..21: mol_type = other RNA
tcggtttacccgccgcctgct

SEQ ID NO: 9113 - RNA, 21 nt, synthetic construct
  source 1..21: mol_type = other RNA
tcgtgaggttcggtctctttt

SEQ ID NO: 9114 - RNA, 21 nt, synthetic construct
  source 1..21: mol_type = other RNA
tcgtgggcctggccctcccca

SEQ ID NO: 9115 - RNA, 21 nt, synthetic construct
  source 1..21: mol_type = other RNA
tcgtgggggtgggggaggagc

SEQ ID NO: 9116 - RNA, 21 nt, synthetic construct
  source 1..21: mol_type = other RNA
tcgttctccacgcccaaggca

SEQ ID NO: 9117 - RNA, 21 nt, synthetic construct
  source 1..21: mol_type = other RNA
tcgttgaatgtgtagggttcg

SEQ ID NO: 9118 - RNA, 21 nt, synthetic construct
  source 1..21: mol_type = other RNA
tcgttttacttgccttgggcg

SEQ ID NO: 9119 - RNA, 21 nt, synthetic construct
  source 1..21: mol_type = other RNA
tcgttttctggcttcccacct

SEQ ID NO: 9120 - RNA, 21 nt, synthetic construct
  source 1..21: mol_type = other RNA
tctaatctaggcgacccaact

SEQ ID NO: 9121 - RNA, 21 nt, synthetic construct
  source 1..21: mol_type = other RNA
tctacaccccacctacctacc

SEQ ID NO: 9122 - RNA, 21 nt, synthetic construct
  source 1..21: mol_type = other RNA
tctaggcgacccaactccccc

SEQ ID NO: 9123 - RNA, 21 nt, synthetic construct
  source 1..21: mol_type = other RNA
tctaggcggccccggcggctt

SEQ ID NO: 9124 - RNA, 21 nt, synthetic construct
  source 1..21: mol_type = other RNA
tctatagaatcaattagcata

SEQ ID NO: 9125 - RNA, 21 nt, synthetic construct
  source 1..21: mol_type = other RNA
tctatagagtccttgcttgtc

SEQ ID NO: 9126 - RNA, 21 nt, synthetic construct
  source 1..21: mol_type = other RNA
tctatgctaattgattctata

SEQ ID NO: 9127 - RNA, 21 nt, synthetic construct
  source 1..21: mol_type = other RNA
tctcacaagatcgttctccac

SEQ ID NO: 9128 - RNA, 21 nt, synthetic construct
  source 1..21: mol_type = other RNA
tctcacatgagcgaaaccact

SEQ ID NO: 9129 - RNA, 21 nt, synthetic construct
  source 1..21: mol_type = other RNA
tctcacccccctcgccgcctt

SEQ ID NO: 9130 - RNA, 21 nt, synthetic construct
  source 1..21: mol_type = other RNA
tctcacttcttgggcgtcagt

SEQ ID NO: 9131 - RNA, 21 nt, synthetic construct
  source 1..21: mol_type = other RNA
tctcagacacgctgtggcaca

SEQ ID NO: 9132 - RNA, 21 nt, synthetic construct
  source 1..21: mol_type = other RNA
tctcatgcgatttacctactt

SEQ ID NO: 9133 - RNA, 21 nt, synthetic construct
  source 1..21: mol_type = other RNA
tctccacgcccaaggcaagta

SEQ ID NO: 9134 - RNA, 21 nt, synthetic construct
  source 1..21: mol_type = other RNA
tctccccgatcccccactccc

SEQ ID NO: 9135 - RNA, 21 nt, synthetic construct
  source 1..21: mol_type = other RNA
tctccccgcgctcgctctcct

SEQ ID NO: 9136 - RNA, 21 nt, synthetic construct
  source 1..21: mol_type = other RNA
tctcccctccgtaatcttcct

SEQ ID NO: 9137 - RNA, 21 nt, synthetic construct
  source 1..21: mol_type = other RNA
tctccctccccctccggttgc

SEQ ID NO: 9138 - RNA, 21 nt, synthetic construct
  source 1..21: mol_type = other RNA
tctccctgggaaaatggggtg

SEQ ID NO: 9139 - RNA, 21 nt, synthetic construct
  source 1..21: mol_type = other RNA
tctccgcccaccgccccgcac

SEQ ID NO: 9140 - RNA, 21 nt, synthetic construct
  source 1..21: mol_type = other RNA
tctcctcaagggaaaggtaaa

SEQ ID NO: 9141 - RNA, 21 nt, synthetic construct
  source 1..21: mol_type = other RNA
tctcctcccgccgtgtgtgaa

SEQ ID NO: 9142 - RNA, 21 nt, synthetic construct
  source 1..21: mol_type = other RNA
tctccttgggtcgtgggcctg

SEQ ID NO: 9143 - RNA, 21 nt, synthetic construct
  source 1..21: mol_type = other RNA
tctcgcagagggaggagcgct

SEQ ID NO: 9144 - RNA, 21 nt, synthetic construct
  source 1..21: mol_type = other RNA
tctcgcccttcaggcggtggg

SEQ ID NO: 9145 - RNA, 21 nt, synthetic construct
  source 1..21: mol_type = other RNA
tctcgcggccttgtgacagac

SEQ ID NO: 9146 - RNA, 21 nt, synthetic construct
  source 1..21: mol_type = other RNA
tctcgcgttgccccctgggtg

SEQ ID NO: 9147 - RNA, 21 nt, synthetic construct
  source 1..21: mol_type = other RNA
tctcgttttctggcttcccac

SEQ ID NO: 9148 - RNA, 21 nt, synthetic construct
  source 1..21: mol_type = other RNA
tctctacaccccacctaccta

SEQ ID NO: 9149 - RNA, 21 nt, synthetic construct
  source 1..21: mol_type = other RNA
tctctaggcggccccggcggc

SEQ ID NO: 9150 - RNA, 21 nt, synthetic construct
  source 1..21: mol_type = other RNA
tctctccccgatcccccactc

SEQ ID NO: 9151 - RNA, 21 nt, synthetic construct
  source 1..21: mol_type = other RNA
tctctccctgggaaaatgggg

SEQ ID NO: 9152 - RNA, 21 nt, synthetic construct
  source 1..21: mol_type = other RNA
tctctctccctgggaaaatgg

SEQ ID NO: 9153 - RNA, 21 nt, synthetic construct
  source 1..21: mol_type = other RNA
tctctgaggagccggagcgcc

SEQ ID NO: 9154 - RNA, 21 nt, synthetic construct
  source 1..21: mol_type = other RNA
tctctggctccccgtggcgtg

SEQ ID NO: 9155 - RNA, 21 nt, synthetic construct
  source 1..21: mol_type = other RNA
tctctttccctctgcgtgtaa

SEQ ID NO: 9156 - RNA, 21 nt, synthetic construct
  source 1..21: mol_type = other RNA
tctcttttctgtcggaccctt

SEQ ID NO: 9157 - RNA, 21 nt, synthetic construct
  source 1..21: mol_type = other RNA
tctgagatagcctcgttgaat

SEQ ID NO: 9158 - RNA, 21 nt, synthetic construct
  source 1..21: mol_type = other RNA
tctgaggagccggagcgccga

SEQ ID NO: 9159 - RNA, 21 nt, synthetic construct
  source 1..21: mol_type = other RNA
tctgaggtgggaagccagaaa

SEQ ID NO: 9160 - RNA, 21 nt, synthetic construct
  source 1..21: mol_type = other RNA
tctgatcgctctgggggccgc

SEQ ID NO: 9161 - RNA, 21 nt, synthetic construct
  source 1..21: mol_type = other RNA
tctgccccccacccccacctc

SEQ ID NO: 9162 - RNA, 21 nt, synthetic construct
  source 1..21: mol_type = other RNA
tctgcctttgaagatattctc

SEQ ID NO: 9163 - RNA, 21 nt, synthetic construct
  source 1..21: mol_type = other RNA
tctgcgagagcaatggctccg

SEQ ID NO: 9164 - RNA, 21 nt, synthetic construct
  source 1..21: mol_type = other RNA
tctgcgtgtaagtcgggaatg

SEQ ID NO: 9165 - RNA, 21 nt, synthetic construct
  source 1..21: mol_type = other RNA
tctggccccgcgcccctgcgc

SEQ ID NO: 9166 - RNA, 21 nt, synthetic construct
  source 1..21: mol_type = other RNA
tctggcgcgggcgtcctccca

SEQ ID NO: 9167 - RNA, 21 nt, synthetic construct
  source 1..21: mol_type = other RNA
tctggctcaactccaggctcg

SEQ ID NO: 9168 - RNA, 21 nt, synthetic construct
  source 1..21: mol_type = other RNA
tctggctccccgtggcgtgtg

SEQ ID NO: 9169 - RNA, 21 nt, synthetic construct
  source 1..21: mol_type = other RNA
tctggcttcccacctcagatg

SEQ ID NO: 9170 - RNA, 21 nt, synthetic construct
  source 1..21: mol_type = other RNA
tctgggggccgcgatctcccc

SEQ ID NO: 9171 - RNA, 21 nt, synthetic construct
  source 1..21: mol_type = other RNA
tctggtggcttgcgggggttg

SEQ ID NO: 9172 - RNA, 21 nt, synthetic construct
  source 1..21: mol_type = other RNA
tctggtgggaggggaggtgcg

SEQ ID NO: 9173 - RNA, 21 nt, synthetic construct
  source 1..21: mol_type = other RNA
tctggttggagtaaagctcct

SEQ ID NO: 9174 - RNA, 21 nt, synthetic construct
  source 1..21: mol_type = other RNA
tctgtcacaaggccgcgagaa

SEQ ID NO: 9175 - RNA, 21 nt, synthetic construct
  source 1..21: mol_type = other RNA
tctgtcggacccttaccttgt

SEQ ID NO: 9176 - RNA, 21 nt, synthetic construct
  source 1..21: mol_type = other RNA
tcttaggaggatgctgccact

SEQ ID NO: 9177 - RNA, 21 nt, synthetic construct
  source 1..21: mol_type = other RNA
tcttcaaaggcagaaaaatat

SEQ ID NO: 9178 - RNA, 21 nt, synthetic construct
  source 1..21: mol_type = other RNA
tcttcacattcccgacttaca

SEQ ID NO: 9179 - RNA, 21 nt, synthetic construct
  source 1..21: mol_type = other RNA
tcttcaccccctttcctggga

SEQ ID NO: 9180 - RNA, 21 nt, synthetic construct
  source 1..21: mol_type = other RNA
tcttcctggacgccttccctc

SEQ ID NO: 9181 - RNA, 21 nt, synthetic construct
  source 1..21: mol_type = other RNA
tcttcgacacctgattggctg

SEQ ID NO: 9182 - RNA, 21 nt, synthetic construct
  source 1..21: mol_type = other RNA
tcttctctaggcggccccggc

SEQ ID NO: 9183 - RNA, 21 nt, synthetic construct
  source 1..21: mol_type = other RNA
tcttgctgccctccgctcgaa

SEQ ID NO: 9184 - RNA, 21 nt, synthetic construct
  source 1..21: mol_type = other RNA
tcttgggcgtcagtggtcttt

SEQ ID NO: 9185 - RNA, 21 nt, synthetic construct
  source 1..21: mol_type = other RNA
tcttgtcgccgattggccgtt

SEQ ID NO: 9186 - RNA, 21 nt, synthetic construct
  source 1..21: mol_type = other RNA
tcttgtgagaatatcttcaaa

SEQ ID NO: 9187 - RNA, 21 nt, synthetic construct
  source 1..21: mol_type = other RNA
tctttccctctgcgtgtaagt

SEQ ID NO: 9188 - RNA, 21 nt, synthetic construct
  source 1..21: mol_type = other RNA
tctttcctacactcctcttca

SEQ ID NO: 9189 - RNA, 21 nt, synthetic construct
  source 1..21: mol_type = other RNA
tctttctcttggatatggatg

SEQ ID NO: 9190 - RNA, 21 nt, synthetic construct
  source 1..21: mol_type = other RNA
tcttttctgtcggacccttac

SEQ ID NO: 9191 - RNA, 21 nt, synthetic construct
  source 1..21: mol_type = other RNA
tgaaaacacaaatggcgtatt

SEQ ID NO: 9192 - RNA, 21 nt, synthetic construct
  source 1..21: mol_type = other RNA
tgaaagggggagttgggtcgc

SEQ ID NO: 9193 - RNA, 21 nt, synthetic construct
  source 1..21: mol_type = other RNA
tgaaatcggctctggcgcggg

SEQ ID NO: 9194 - RNA, 21 nt, synthetic construct
  source 1..21: mol_type = other RNA
tgaaccagggctctttcctac

SEQ ID NO: 9195 - RNA, 21 nt, synthetic construct
  source 1..21: mol_type = other RNA
tgaagaggagtgtaggaaaga

SEQ ID NO: 9196 - RNA, 21 nt, synthetic construct
  source 1..21: mol_type = other RNA
tgaagaggcgttgggggaggg

SEQ ID NO: 9197 - RNA, 21 nt, synthetic construct
  source 1..21: mol_type = other RNA
tgaagatattctcacaagatc

SEQ ID NO: 9198 - RNA, 21 nt, synthetic construct
  source 1..21: mol_type = other RNA
tgaagggcgagacaagcccga

SEQ ID NO: 9199 - RNA, 21 nt, synthetic construct
  source 1..21: mol_type = other RNA
tgaatgtgtagggttcgagcc

SEQ ID NO: 9200 - RNA, 21 nt, synthetic construct
  source 1..21: mol_type = other RNA
tgaattctctttccctctgcg

SEQ ID NO: 9201 - RNA, 21 nt, synthetic construct
  source 1..21: mol_type = other RNA
tgacagacaactctgatcgct

SEQ ID NO: 9202 - RNA, 21 nt, synthetic construct
  source 1..21: mol_type = other RNA
tgacaggagctttactccaac

SEQ ID NO: 9203 - RNA, 21 nt, synthetic construct
  source 1..21: mol_type = other RNA
tgacccaggaaaaacatgaaa

SEQ ID NO: 9204 - RNA, 21 nt, synthetic construct
  source 1..21: mol_type = other RNA
tgaccctcccctcccgccgca

SEQ ID NO: 9205 - RNA, 21 nt, synthetic construct
  source 1..21: mol_type = other RNA
tgacccttccctcccctgggg

SEQ ID NO: 9206 - RNA, 21 nt, synthetic construct
  source 1..21: mol_type = other RNA
tgaccgcacggggattcccag

SEQ ID NO: 9207 - RNA, 21 nt, synthetic construct
  source 1..21: mol_type = other RNA
tgacgcccaagaagtgagaca

SEQ ID NO: 9208 - RNA, 21 nt, synthetic construct
  source 1..21: mol_type = other RNA
tgactgcagcatccatatcca

SEQ ID NO: 9209 - RNA, 21 nt, synthetic construct
  source 1..21: mol_type = other RNA
tgagaagtggcagcatcctcc

SEQ ID NO: 9210 - RNA, 21 nt, synthetic construct
  source 1..21: mol_type = other RNA
tgagaatatcttcaaaggcag

SEQ ID NO: 9211 - RNA, 21 nt, synthetic construct
  source 1..21: mol_type = other RNA
tgagacaagcaaggactctat

SEQ ID NO: 9212 - RNA, 21 nt, synthetic construct
  source 1..21: mol_type = other RNA
tgagactcgagccagtagcaa

SEQ ID NO: 9213 - RNA, 21 nt, synthetic construct
  source 1..21: mol_type = other RNA
tgagagggaaagttaaactgt

SEQ ID NO: 9214 - RNA, 21 nt, synthetic construct
  source 1..21: mol_type = other RNA
tgagatagcctcgttgaatgt

SEQ ID NO: 9215 - RNA, 21 nt, synthetic construct
  source 1..21: mol_type = other RNA
tgagccagattgtgtcgtttt

SEQ ID NO: 9216 - RNA, 21 nt, synthetic construct
  source 1..21: mol_type = other RNA
tgagcgaaaccactgcgcggg

SEQ ID NO: 9217 - RNA, 21 nt, synthetic construct
  source 1..21: mol_type = other RNA
tgaggagaggcctcttgctgc

SEQ ID NO: 9218 - RNA, 21 nt, synthetic construct
  source 1..21: mol_type = other RNA
tgaggagccggagcgccgaag

SEQ ID NO: 9219 - RNA, 21 nt, synthetic construct
  source 1..21: mol_type = other RNA
tgaggtgggaagccagaaaac

SEQ ID NO: 9220 - RNA, 21 nt, synthetic construct
  source 1..21: mol_type = other RNA
tgaggtgggggtggggggcag

SEQ ID NO: 9221 - RNA, 21 nt, synthetic construct
  source 1..21: mol_type = other RNA
tgaggttcggtctcttttctg

SEQ ID NO: 9222 - RNA, 21 nt, synthetic construct
  source 1..21: mol_type = other RNA
tgagtctctgagcgcaggcgg

SEQ ID NO: 9223 - RNA, 21 nt, synthetic construct
  source 1..21: mol_type = other RNA
tgatcgctctgggggccgcga

SEQ ID NO: 9224 - RNA, 21 nt, synthetic construct
  source 1..21: mol_type = other RNA
tgattctatagagtccttgct

SEQ ID NO: 9225 - RNA, 21 nt, synthetic construct
  source 1..21: mol_type = other RNA
tgattggcggcgagtgggcca

SEQ ID NO: 9226 - RNA, 21 nt, synthetic construct
  source 1..21: mol_type = other RNA
tgattggctgtcgaagctgtg

SEQ ID NO: 9227 - RNA, 21 nt, synthetic construct
  source 1..21: mol_type = other RNA
tgcaacaccccattttcccag

SEQ ID NO: 9228 - RNA, 21 nt, synthetic construct
  source 1..21: mol_type = other RNA
tgcaacggtgtgtgcaaggcg

SEQ ID NO: 9229 - RNA, 21 nt, synthetic construct
  source 1..21: mol_type = other RNA
tgcaaggcggcgaggggggtg

SEQ ID NO: 9230 - RNA, 21 nt, synthetic construct
  source 1..21: mol_type = other RNA
tgcacacaccgttgcaacacc

SEQ ID NO: 9231 - RNA, 21 nt, synthetic construct
  source 1..21: mol_type = other RNA
tgcagcatccatatccaagag

SEQ ID NO: 9232 - RNA, 21 nt, synthetic construct
  source 1..21: mol_type = other RNA
tgcatccagccacccctttcc

SEQ ID NO: 9233 - RNA, 21 nt, synthetic construct
  source 1..21: mol_type = other RNA
tgccacagcgtgtctgagata

SEQ ID NO: 9234 - RNA, 21 nt, synthetic construct
  source 1..21: mol_type = other RNA
tgccacgttgcgcaggggcgc

SEQ ID NO: 9235 - RNA, 21 nt, synthetic construct
  source 1..21: mol_type = other RNA
tgccacttctcacccccctcg

SEQ ID NO: 9236 - RNA, 21 nt, synthetic construct
  source 1..21: mol_type = other RNA
tgccccccacccccacctcac

SEQ ID NO: 9237 - RNA, 21 nt, synthetic construct
  source 1..21: mol_type = other RNA
tgccccctgggtggggcgggt

SEQ ID NO: 9238 - RNA, 21 nt, synthetic construct
  source 1..21: mol_type = other RNA
tgcccctggcgccggcgctgg

SEQ ID NO: 9239 - RNA, 21 nt, synthetic construct
  source 1..21: mol_type = other RNA
tgcccgagcggaaacgccact

SEQ ID NO: 9240 - RNA, 21 nt, synthetic construct
  source 1..21: mol_type = other RNA
tgccctccgctcgaaatacac

SEQ ID NO: 9241 - RNA, 21 nt, synthetic construct
  source 1..21: mol_type = other RNA
tgccggcccccctctttccct

SEQ ID NO: 9242 - RNA, 21 nt, synthetic construct
  source 1..21: mol_type = other RNA
tgccggccgagacttctggat

SEQ ID NO: 9243 - RNA, 21 nt, synthetic construct
  source 1..21: mol_type = other RNA
tgcctactccacgtttacctt

SEQ ID NO: 9244 - RNA, 21 nt, synthetic construct
  source 1..21: mol_type = other RNA
tgcctgtagcaggtcgggctt

SEQ ID NO: 9245 - RNA, 21 nt, synthetic construct
  source 1..21: mol_type = other RNA
tgcctgtgtatttcgagcgga

SEQ ID NO: 9246 - RNA, 21 nt, synthetic construct
  source 1..21: mol_type = other RNA
tgccttgggcgtggagaacga

SEQ ID NO: 9247 - RNA, 21 nt, synthetic construct
  source 1..21: mol_type = other RNA
tgcctttcccgtgggaagtcg

SEQ ID NO: 9248 - RNA, 21 nt, synthetic construct
  source 1..21: mol_type = other RNA
tgcctttgaagatattctcac

SEQ ID NO: 9249 - RNA, 21 nt, synthetic construct
  source 1..21: mol_type = other RNA
tgcctttgggaagcagccatc

SEQ ID NO: 9250 - RNA, 21 nt, synthetic construct
  source 1..21: mol_type = other RNA
tgcgagagcaatggctccgtc

SEQ ID NO: 9251 - RNA, 21 nt, synthetic construct
  source 1..21: mol_type = other RNA
tgcgatttacctacttgaacc

SEQ ID NO: 9252 - RNA, 21 nt, synthetic construct
  source 1..21: mol_type = other RNA
tgcgcaacgtggcaggaagcg

SEQ ID NO: 9253 - RNA, 21 nt, synthetic construct
  source 1..21: mol_type = other RNA
tgcgcaggggcgcggggccag

SEQ ID NO: 9254 - RNA, 21 nt, synthetic construct
  source 1..21: mol_type = other RNA
tgcgctcagagactcacgcag

SEQ ID NO: 9255 - RNA, 21 nt, synthetic construct
  source 1..21: mol_type = other RNA
tgcggcaaccggagggggagg

SEQ ID NO: 9256 - RNA, 21 nt, synthetic construct
  source 1..21: mol_type = other RNA
tgcggcgctcggcctcgggga

SEQ ID NO: 9257 - RNA, 21 nt, synthetic construct
  source 1..21: mol_type = other RNA
tgcggcgggaggggagggtca

SEQ ID NO: 9258 - RNA, 21 nt, synthetic construct
  source 1..21: mol_type = other RNA
tgcggggcggtgggcggagag

SEQ ID NO: 9259 - RNA, 21 nt, synthetic construct
  source 1..21: mol_type = other RNA
tgcgggggttgcctttcccgt

SEQ ID NO: 9260 - RNA, 21 nt, synthetic construct
  source 1..21: mol_type = other RNA
tgcggtacactggggggatgg

SEQ ID NO: 9261 - RNA, 21 nt, synthetic construct
  source 1..21: mol_type = other RNA
tgcggtcagtggcgtttccgc

SEQ ID NO: 9262 - RNA, 21 nt, synthetic construct
  source 1..21: mol_type = other RNA
tgcgtactcccgacggcgtaa

SEQ ID NO: 9263 - RNA, 21 nt, synthetic construct
  source 1..21: mol_type = other RNA
tgcgtgagtctctgagcgcag

SEQ ID NO: 9264 - RNA, 21 nt, synthetic construct
  source 1..21: mol_type = other RNA
tgcgtgtaagtcgggaatgtg

SEQ ID NO: 9265 - RNA, 21 nt, synthetic construct
  source 1..21: mol_type = other RNA
tgctaattgattctatagagt

SEQ ID NO: 9266 - RNA, 21 nt, synthetic construct
  source 1..21: mol_type = other RNA
tgctacaggcactcgtggggg

SEQ ID NO: 9267 - RNA, 21 nt, synthetic construct
  source 1..21: mol_type = other RNA
tgctactggctcgagtctcac

SEQ ID NO: 9268 - RNA, 21 nt, synthetic construct
  source 1..21: mol_type = other RNA
tgctcgaaaccggacggagcc

SEQ ID NO: 9269 - RNA, 21 nt, synthetic construct
  source 1..21: mol_type = other RNA
tgctctcgcagagggaggagc

SEQ ID NO: 9270 - RNA, 21 nt, synthetic construct
  source 1..21: mol_type = other RNA
tgctgccacttctcacccccc

SEQ ID NO: 9271 - RNA, 21 nt, synthetic construct
  source 1..21: mol_type = other RNA
tgctgccctccgctcgaaata

SEQ ID NO: 9272 - RNA, 21 nt, synthetic construct
  source 1..21: mol_type = other RNA
tgcttcccaaaggcattacct

SEQ ID NO: 9273 - RNA, 21 nt, synthetic construct
  source 1..21: mol_type = other RNA
tgcttcggcgctccggctcct

SEQ ID NO: 9274 - RNA, 21 nt, synthetic construct
  source 1..21: mol_type = other RNA
tgcttgtctcacttcttgggc

SEQ ID NO: 9275 - RNA, 21 nt, synthetic construct
  source 1..21: mol_type = other RNA
tgcttgtcttcgacacctgat

SEQ ID NO: 9276 - RNA, 21 nt, synthetic construct
  source 1..21: mol_type = other RNA
tggacgccttccctctcgttt

SEQ ID NO: 9277 - RNA, 21 nt, synthetic construct
  source 1..21: mol_type = other RNA
tggagaacgatcttgtgagaa

SEQ ID NO: 9278 - RNA, 21 nt, synthetic construct
  source 1..21: mol_type = other RNA
tggagtaaagctcctgtcagt

SEQ ID NO: 9279 - RNA, 21 nt, synthetic construct
  source 1..21: mol_type = other RNA
tggagtaggcagttcccagga

SEQ ID NO: 9280 - RNA, 21 nt, synthetic construct
  source 1..21: mol_type = other RNA
tggagttgagccagattgtgt

SEQ ID NO: 9281 - RNA, 21 nt, synthetic construct
  source 1..21: mol_type = other RNA
tggatgcaggcgggagggagg

SEQ ID NO: 9282 - RNA, 21 nt, synthetic construct
  source 1..21: mol_type = other RNA
tggcacacgccacggggagcc

SEQ ID NO: 9283 - RNA, 21 nt, synthetic construct
  source 1..21: mol_type = other RNA
tggcagcatcctcctaagagc

SEQ ID NO: 9284 - RNA, 21 nt, synthetic construct
  source 1..21: mol_type = other RNA
tggcaggaagcgcgcgctgga

SEQ ID NO: 9285 - RNA, 21 nt, synthetic construct
  source 1..21: mol_type = other RNA
tggcccactcgccgccaatca

SEQ ID NO: 9286 - RNA, 21 nt, synthetic construct
  source 1..21: mol_type = other RNA
tggccccgcgcccctgcgcaa

SEQ ID NO: 9287 - RNA, 21 nt, synthetic construct
  source 1..21: mol_type = other RNA
tggcccgtacccgtgaggtgg

SEQ ID NO: 9288 - RNA, 21 nt, synthetic construct
  source 1..21: mol_type = other RNA
tggccctccccaagctcttag

SEQ ID NO: 9289 - RNA, 21 nt, synthetic construct
  source 1..21: mol_type = other RNA
tggccgggaatggcccgtacc

SEQ ID NO: 9290 - RNA, 21 nt, synthetic construct
  source 1..21: mol_type = other RNA
tggccgtttctcctcccgccg

SEQ ID NO: 9291 - RNA, 21 nt, synthetic construct
  source 1..21: mol_type = other RNA
tggcctctccgcccaccgccc

SEQ ID NO: 9292 - RNA, 21 nt, synthetic construct
  source 1..21: mol_type = other RNA
tggcgaaggtaatgcctttgg

SEQ ID NO: 9293 - RNA, 21 nt, synthetic construct
  source 1..21: mol_type = other RNA
tggcgccgcgttgggcctaac

SEQ ID NO: 9294 - RNA, 21 nt, synthetic construct
  source 1..21: mol_type = other RNA
tggcgccggcgctgggaatcc

SEQ ID NO: 9295 - RNA, 21 nt, synthetic construct
  source 1..21: mol_type = other RNA
tggcgcgggcgtcctcccacc

SEQ ID NO: 9296 - RNA, 21 nt, synthetic construct
  source 1..21: mol_type = other RNA
tggcggactggcgggactggg

SEQ ID NO: 9297 - RNA, 21 nt, synthetic construct
  source 1..21: mol_type = other RNA
tggcggcgagtgggccaatgg

SEQ ID NO: 9298 - RNA, 21 nt, synthetic construct
  source 1..21: mol_type = other RNA
tggcgggactggggctgcgtg

SEQ ID NO: 9299 - RNA, 21 nt, synthetic construct
  source 1..21: mol_type = other RNA
tggcggggaggcgggcgttgg

SEQ ID NO: 9300 - RNA, 21 nt, synthetic construct
  source 1..21: mol_type = other RNA
tggcgtattctggttggagta

SEQ ID NO: 9301 - RNA, 21 nt, synthetic construct
  source 1..21: mol_type = other RNA
tggcgtgtgccacagcgtgtc

SEQ ID NO: 9302 - RNA, 21 nt, synthetic construct
  source 1..21: mol_type = other RNA
tggcgtttccgctcgggcagc

SEQ ID NO: 9303 - RNA, 21 nt, synthetic construct
  source 1..21: mol_type = other RNA
tggctaggggggccgtctggt

SEQ ID NO: 9304 - RNA, 21 nt, synthetic construct
  source 1..21: mol_type = other RNA
tggctcaactccaggctcgaa

SEQ ID NO: 9305 - RNA, 21 nt, synthetic construct
  source 1..21: mol_type = other RNA
tggctccccgtggcgtgtgcc

SEQ ID NO: 9306 - RNA, 21 nt, synthetic construct
  source 1..21: mol_type = other RNA
tggctccgtccggtttcgagc

SEQ ID NO: 9307 - RNA, 21 nt, synthetic construct
  source 1..21: mol_type = other RNA
tggctcgagtctcacatgagc

SEQ ID NO: 9308 - RNA, 21 nt, synthetic construct
  source 1..21: mol_type = other RNA
tggctcgctccgcctttctgc

SEQ ID NO: 9309 - RNA, 21 nt, synthetic construct
  source 1..21: mol_type = other RNA
tggctgcttcccaaaggcatt

SEQ ID NO: 9310 - RNA, 21 nt, synthetic construct
  source 1..21: mol_type = other RNA
tggctggatgcaggcgggagg

SEQ ID NO: 9311 - RNA, 21 nt, synthetic construct
  source 1..21: mol_type = other RNA
tggctgtcgaagctgtgggac

SEQ ID NO: 9312 - RNA, 21 nt, synthetic construct
  source 1..21: mol_type = other RNA
tggcttcccacctcagatggc

SEQ ID NO: 9313 - RNA, 21 nt, synthetic construct
  source 1..21: mol_type = other RNA
tggcttgcgggggttgccttt

SEQ ID NO: 9314 - RNA, 21 nt, synthetic construct
  source 1..21: mol_type = other RNA
tgggaaaatggggtgttgcaa

SEQ ID NO: 9315 - RNA, 21 nt, synthetic construct
  source 1..21: mol_type = other RNA
tgggaaagccccttctatgct

SEQ ID NO: 9316 - RNA, 21 nt, synthetic construct
  source 1..21: mol_type = other RNA
tgggaactgcctactccacgt

SEQ ID NO: 9317 - RNA, 21 nt, synthetic construct
  source 1..21: mol_type = other RNA
tgggaagcagccatctgaggt

SEQ ID NO: 9318 - RNA, 21 nt, synthetic construct
  source 1..21: mol_type = other RNA
tgggaagccagaaaacgagag

SEQ ID NO: 9319 - RNA, 21 nt, synthetic construct
  source 1..21: mol_type = other RNA
tgggaagtcgggaacataatg

SEQ ID NO: 9320 - RNA, 21 nt, synthetic construct
  source 1..21: mol_type = other RNA
tgggaatccccgtgcggtcag

SEQ ID NO: 9321 - RNA, 21 nt, synthetic construct
  source 1..21: mol_type = other RNA
tgggacaaggtaagggtccga

SEQ ID NO: 9322 - RNA, 21 nt, synthetic construct
  source 1..21: mol_type = other RNA
tgggaccgggcccttgctact

SEQ ID NO: 9323 - RNA, 21 nt, synthetic construct
  source 1..21: mol_type = other RNA
tgggaggacgcccgcgccaga

SEQ ID NO: 9324 - RNA, 21 nt, synthetic construct
  source 1..21: mol_type = other RNA
tgggagggaaaggggtggctg

SEQ ID NO: 9325 - RNA, 21 nt, synthetic construct
  source 1..21: mol_type = other RNA
tgggaggggaggtgcggtaca

SEQ ID NO: 9326 - RNA, 21 nt, synthetic construct
  source 1..21: mol_type = other RNA
tgggccaatgggtgcggggcg

SEQ ID NO: 9327 - RNA, 21 nt, synthetic construct
  source 1..21: mol_type = other RNA
tgggcctaactcgagtcctgc

SEQ ID NO: 9328 - RNA, 21 nt, synthetic construct
  source 1..21: mol_type = other RNA
tgggcctggccctccccaagc

SEQ ID NO: 9329 - RNA, 21 nt, synthetic construct
  source 1..21: mol_type = other RNA
tgggcggagaggccaatggcg

SEQ ID NO: 9330 - RNA, 21 nt, synthetic construct
  source 1..21: mol_type = other RNA
tgggcgtcagtggtctttctc

SEQ ID NO: 9331 - RNA, 21 nt, synthetic construct
  source 1..21: mol_type = other RNA
tgggcgtggagaacgatcttg

SEQ ID NO: 9332 - RNA, 21 nt, synthetic construct
  source 1..21: mol_type = other RNA
tggggagggccaggcccacga

SEQ ID NO: 9333 - RNA, 21 nt, synthetic construct
  source 1..21: mol_type = other RNA
tggggcccgatcgtgaggttc

SEQ ID NO: 9334 - RNA, 21 nt, synthetic construct
  source 1..21: mol_type = other RNA
tggggcgggtaggtaggtggg

SEQ ID NO: 9335 - RNA, 21 nt, synthetic construct
  source 1..21: mol_type = other RNA
tggggctgcgtgagtctctga

SEQ ID NO: 9336 - RNA, 21 nt, synthetic construct
  source 1..21: mol_type = other RNA
tgggggaggagcgggggtcgg

SEQ ID NO: 9337 - RNA, 21 nt, synthetic construct
  source 1..21: mol_type = other RNA
tgggggaggggaagcgtcctg

SEQ ID NO: 9338 - RNA, 21 nt, synthetic construct
  source 1..21: mol_type = other RNA
tgggggccgcgatctcccctc

SEQ ID NO: 9339 - RNA, 21 nt, synthetic construct
  source 1..21: mol_type = other RNA
tggggggatgggtggctaggg

SEQ ID NO: 9340 - RNA, 21 nt, synthetic construct
  source 1..21: mol_type = other RNA
tggggggcagaaaggcggagc

SEQ ID NO: 9341 - RNA, 21 nt, synthetic construct
  source 1..21: mol_type = other RNA
tgggggtggcgaaggtaatgc

SEQ ID NO: 9342 - RNA, 21 nt, synthetic construct
  source 1..21: mol_type = other RNA
tgggggtgggggaggagcggg

SEQ ID NO: 9343 - RNA, 21 nt, synthetic construct
  source 1..21: mol_type = other RNA
tgggggtggggggcagaaagg

SEQ ID NO: 9344 - RNA, 21 nt, synthetic construct
  source 1..21: mol_type = other RNA
tggggtgtagagatgctgggt

SEQ ID NO: 9345 - RNA, 21 nt, synthetic construct
  source 1..21: mol_type = other RNA
tggggtgttgcaacggtgtgt

SEQ ID NO: 9346 - RNA, 21 nt, synthetic construct
  source 1..21: mol_type = other RNA
tgggtcaggacgcttcccctc

SEQ ID NO: 9347 - RNA, 21 nt, synthetic construct
  source 1..21: mol_type = other RNA
tgggtcgcctagattagaggg

SEQ ID NO: 9348 - RNA, 21 nt, synthetic construct
  source 1..21: mol_type = other RNA
tgggtcgtgggcctggccctc

SEQ ID NO: 9349 - RNA, 21 nt, synthetic construct
  source 1..21: mol_type = other RNA
tgggtgcggggcggtgggcgg

SEQ ID NO: 9350 - RNA, 21 nt, synthetic construct
  source 1..21: mol_type = other RNA
tgggtggctaggggggccgtc

SEQ ID NO: 9351 - RNA, 21 nt, synthetic construct
  source 1..21: mol_type = other RNA
tgggtggggcgggtaggtagg

SEQ ID NO: 9352 - RNA, 21 nt, synthetic construct
  source 1..21: mol_type = other RNA
tggtacggtcctccccgaggc

SEQ ID NO: 9353 - RNA, 21 nt, synthetic construct
  source 1..21: mol_type = other RNA
tggtctttctcttggatatgg

SEQ ID NO: 9354 - RNA, 21 nt, synthetic construct
  source 1..21: mol_type = other RNA
tggtggcttgcgggggttgcc

SEQ ID NO: 9355 - RNA, 21 nt, synthetic construct
  source 1..21: mol_type = other RNA
tggtgggaggggaggtgcggt

SEQ ID NO: 9356 - RNA, 21 nt, synthetic construct
  source 1..21: mol_type = other RNA
tggtgggggtggcgaaggtaa

SEQ ID NO: 9357 - RNA, 21 nt, synthetic construct
  source 1..21: mol_type = other RNA
tggttcaagtaggtaaatcgc

SEQ ID NO: 9358 - RNA, 21 nt, synthetic construct
  source 1..21: mol_type = other RNA
tggttggagtaaagctcctgt

SEQ ID NO: 9359 - RNA, 21 nt, synthetic construct
  source 1..21: mol_type = other RNA
tggtttcgctcatgtgagact

SEQ ID NO: 9360 - RNA, 21 nt, synthetic construct
  source 1..21: mol_type = other RNA
tgtaagtcgggaatgtgaaga

SEQ ID NO: 9361 - RNA, 21 nt, synthetic construct
  source 1..21: mol_type = other RNA
tgtaccgcacctcccctccca

SEQ ID NO: 9362 - RNA, 21 nt, synthetic construct
  source 1..21: mol_type = other RNA
tgtagagatgctgggtgtgcg

SEQ ID NO: 9363 - RNA, 21 nt, synthetic construct
  source 1..21: mol_type = other RNA
tgtagcaggtcgggcttgtct

SEQ ID NO: 9364 - RNA, 21 nt, synthetic construct
  source 1..21: mol_type = other RNA
tgtaggaaagagccctggttc

SEQ ID NO: 9365 - RNA, 21 nt, synthetic construct
  source 1..21: mol_type = other RNA
tgtagggttcgagcctggagt

SEQ ID NO: 9366 - RNA, 21 nt, synthetic construct
  source 1..21: mol_type = other RNA
tgtatttcgagcggagggcag

SEQ ID NO: 9367 - RNA, 21 nt, synthetic construct
  source 1..21: mol_type = other RNA
tgtcacaaggccgcgagaacg

SEQ ID NO: 9368 - RNA, 21 nt, synthetic construct
  source 1..21: mol_type = other RNA
tgtcagttacgccgtcgggag

SEQ ID NO: 9369 - RNA, 21 nt, synthetic construct
  source 1..21: mol_type = other RNA
tgtcgaagacaagcaggcggc

SEQ ID NO: 9370 - RNA, 21 nt, synthetic construct
  source 1..21: mol_type = other RNA
tgtcgaagctgtgggaccggg

SEQ ID NO: 9371 - RNA, 21 nt, synthetic construct
  source 1..21: mol_type = other RNA
tgtcgccgattggccgtttct

SEQ ID NO: 9372 - RNA, 21 nt, synthetic construct
  source 1..21: mol_type = other RNA
tgtcggacccttaccttgtcc

SEQ ID NO: 9373 - RNA, 21 nt, synthetic construct
  source 1..21: mol_type = other RNA
tgtcgttttacttgccttggg

SEQ ID NO: 9374 - RNA, 21 nt, synthetic construct
  source 1..21: mol_type = other RNA
tgtctcacttcttgggcgtca

SEQ ID NO: 9375 - RNA, 21 nt, synthetic construct
  source 1..21: mol_type = other RNA
tgtctcgcccttcaggcggtg

SEQ ID NO: 9376 - RNA, 21 nt, synthetic construct
  source 1..21: mol_type = other RNA
tgtctgagatagcctcgttga

SEQ ID NO: 9377 - RNA, 21 nt, synthetic construct
  source 1..21: mol_type = other RNA
tgtctggccccgcgcccctgc

SEQ ID NO: 9378 - RNA, 21 nt, synthetic construct
  source 1..21: mol_type = other RNA
tgtctgtcacaaggccgcgag

SEQ ID NO: 9379 - RNA, 21 nt, synthetic construct
  source 1..21: mol_type = other RNA
tgtcttcgacacctgattggc

SEQ ID NO: 9380 - RNA, 21 nt, synthetic construct
  source 1..21: mol_type = other RNA
tgtgaaaacacaaatggcgta

SEQ ID NO: 9381 - RNA, 21 nt, synthetic construct
  source 1..21: mol_type = other RNA
tgtgaagaggagtgtaggaaa

SEQ ID NO: 9382 - RNA, 21 nt, synthetic construct
  source 1..21: mol_type = other RNA
tgtgacagacaactctgatcg

SEQ ID NO: 9383 - RNA, 21 nt, synthetic construct
  source 1..21: mol_type = other RNA
tgtgagaatatcttcaaaggc

SEQ ID NO: 9384 - RNA, 21 nt, synthetic construct
  source 1..21: mol_type = other RNA
tgtgagactcgagccagtagc

SEQ ID NO: 9385 - RNA, 21 nt, synthetic construct
  source 1..21: mol_type = other RNA
tgtgcaaggcggcgagggggg

SEQ ID NO: 9386 - RNA, 21 nt, synthetic construct
  source 1..21: mol_type = other RNA
tgtgccacagcgtgtctgaga

SEQ ID NO: 9387 - RNA, 21 nt, synthetic construct
  source 1..21: mol_type = other RNA
tgtgcttcggcgctccggctc

SEQ ID NO: 9388 - RNA, 21 nt, synthetic construct
  source 1..21: mol_type = other RNA
tgtggcacacgccacggggag

SEQ ID NO: 9389 - RNA, 21 nt, synthetic construct
  source 1..21: mol_type = other RNA
tgtgggaccgggcccttgcta

SEQ ID NO: 9390 - RNA, 21 nt, synthetic construct
  source 1..21: mol_type = other RNA
tgtggtgggggtggcgaaggt

SEQ ID NO: 9391 - RNA, 21 nt, synthetic construct
  source 1..21: mol_type = other RNA
tgtgtagggttcgagcctgga

SEQ ID NO: 9392 - RNA, 21 nt, synthetic construct
  source 1..21: mol_type = other RNA
tgtgtatttcgagcggagggc

SEQ ID NO: 9393 - RNA, 21 nt, synthetic construct
  source 1..21: mol_type = other RNA
tgtgtcgttttacttgccttg

SEQ ID NO: 9394 - RNA, 21 nt, synthetic construct
  source 1..21: mol_type = other RNA
tgtgtgaaaacacaaatggcg

SEQ ID NO: 9395 - RNA, 21 nt, synthetic construct
  source 1..21: mol_type = other RNA
tgtgtgcaaggcggcgagggg

SEQ ID NO: 9396 - RNA, 21 nt, synthetic construct
  source 1..21: mol_type = other RNA
tgtgttggcggactggcggga

SEQ ID NO: 9397 - RNA, 21 nt, synthetic construct
  source 1..21: mol_type = other RNA
tgtgttttcacacacggcggg

SEQ ID NO: 9398 - RNA, 21 nt, synthetic construct
  source 1..21: mol_type = other RNA
tgttacgttgggagggaaagg

SEQ ID NO: 9399 - RNA, 21 nt, synthetic construct
  source 1..21: mol_type = other RNA
tgttcccgacttcccacggga

SEQ ID NO: 9400 - RNA, 21 nt, synthetic construct
  source 1..21: mol_type = other RNA
tgttgcaacggtgtgtgcaag

SEQ ID NO: 9401 - RNA, 21 nt, synthetic construct
  source 1..21: mol_type = other RNA
tgttggcggactggcgggact

SEQ ID NO: 9402 - RNA, 21 nt, synthetic construct
  source 1..21: mol_type = other RNA
tgttgggaaagccccttctat

SEQ ID NO: 9403 - RNA, 21 nt, synthetic construct
  source 1..21: mol_type = other RNA
tgtttgttacgttgggaggga

SEQ ID NO: 9404 - RNA, 21 nt, synthetic construct
  source 1..21: mol_type = other RNA
tgttttcacacacggcgggag

SEQ ID NO: 9405 - RNA, 21 nt, synthetic construct
  source 1..21: mol_type = other RNA
tgtttttcctgggtcaggacg

SEQ ID NO: 9406 - RNA, 21 nt, synthetic construct
  source 1..21: mol_type = other RNA
ttaaactgttgggaaagcccc

SEQ ID NO: 9407 - RNA, 21 nt, synthetic construct
  source 1..21: mol_type = other RNA
ttaactttccctctcatgcga

SEQ ID NO: 9408 - RNA, 21 nt, synthetic construct
  source 1..21: mol_type = other RNA
ttacacgcagagggaaagaga

SEQ ID NO: 9409 - RNA, 21 nt, synthetic construct
  source 1..21: mol_type = other RNA
ttacccgccgcctgcttgtct

SEQ ID NO: 9410 - RNA, 21 nt, synthetic construct
  source 1..21: mol_type = other RNA
ttacctacttgaaccagggct

SEQ ID NO: 9411 - RNA, 21 nt, synthetic construct
  source 1..21: mol_type = other RNA
ttaccttcgccacccccacca

SEQ ID NO: 9412 - RNA, 21 nt, synthetic construct
  source 1..21: mol_type = other RNA
ttaccttgtcccaggcgctgc

SEQ ID NO: 9413 - RNA, 21 nt, synthetic construct
  source 1..21: mol_type = other RNA
ttacctttcccttgaggagag

SEQ ID NO: 9414 - RNA, 21 nt, synthetic construct
  source 1..21: mol_type = other RNA
ttacgccgtcgggagtacgca

SEQ ID NO: 9415 - RNA, 21 nt, synthetic construct
  source 1..21: mol_type = other RNA
ttacggaggggagatcgcggc

SEQ ID NO: 9416 - RNA, 21 nt, synthetic construct
  source 1..21: mol_type = other RNA
ttacgttgggagggaaagggg

SEQ ID NO: 9417 - RNA, 21 nt, synthetic construct
  source 1..21: mol_type = other RNA
ttactccaaccagaatacgcc

SEQ ID NO: 9418 - RNA, 21 nt, synthetic construct
  source 1..21: mol_type = other RNA
ttacttgccttgggcgtggag

SEQ ID NO: 9419 - RNA, 21 nt, synthetic construct
  source 1..21: mol_type = other RNA
ttagagggggatctctctccc

SEQ ID NO: 9420 - RNA, 21 nt, synthetic construct
  source 1..21: mol_type = other RNA
ttagcatagaaggggctttcc

SEQ ID NO: 9421 - RNA, 21 nt, synthetic construct
  source 1..21: mol_type = other RNA
ttagcgactctcgcgttgccc

SEQ ID NO: 9422 - RNA, 21 nt, synthetic construct
  source 1..21: mol_type = other RNA
ttaggaggatgctgccacttc

SEQ ID NO: 9423 - RNA, 21 nt, synthetic construct
  source 1..21: mol_type = other RNA
ttaggcccaacgcggcgccac

SEQ ID NO: 9424 - RNA, 21 nt, synthetic construct
  source 1..21: mol_type = other RNA
ttatgaattctctttccctct

SEQ ID NO: 9425 - RNA, 21 nt, synthetic construct
  source 1..21: mol_type = other RNA
ttatgttcccgacttcccacg

SEQ ID NO: 9426 - RNA, 21 nt, synthetic construct
  source 1..21: mol_type = other RNA
ttcaaaggcagaaaaatattc

SEQ ID NO: 9427 - RNA, 21 nt, synthetic construct
  source 1..21: mol_type = other RNA
ttcaacgaggctatctcagac

SEQ ID NO: 9428 - RNA, 21 nt, synthetic construct
  source 1..21: mol_type = other RNA
ttcaagtaggtaaatcgcatg

SEQ ID NO: 9429 - RNA, 21 nt, synthetic construct
  source 1..21: mol_type = other RNA
ttcacacacggcgggaggaga

SEQ ID NO: 9430 - RNA, 21 nt, synthetic construct
  source 1..21: mol_type = other RNA
ttcacattcccgacttacacg

SEQ ID NO: 9431 - RNA, 21 nt, synthetic construct
  source 1..21: mol_type = other RNA
ttcaccccctttcctgggaac

SEQ ID NO: 9432 - RNA, 21 nt, synthetic construct
  source 1..21: mol_type = other RNA
ttcactgaccctcccctcccg

SEQ ID NO: 9433 - RNA, 21 nt, synthetic construct
  source 1..21: mol_type = other RNA
ttcaggcggtgggaacccggg

SEQ ID NO: 9434 - RNA, 21 nt, synthetic construct
  source 1..21: mol_type = other RNA
ttcataaagggaatatttttc

SEQ ID NO: 9435 - RNA, 21 nt, synthetic construct
  source 1..21: mol_type = other RNA
ttcatgtttttcctgggtcag

SEQ ID NO: 9436 - RNA, 21 nt, synthetic construct
  source 1..21: mol_type = other RNA
ttcccaaaggcattaccttcg

SEQ ID NO: 9437 - RNA, 21 nt, synthetic construct
  source 1..21: mol_type = other RNA
ttcccaacagtttaactttcc

SEQ ID NO: 9438 - RNA, 21 nt, synthetic construct
  source 1..21: mol_type = other RNA
ttcccaccgcctgaagggcga

SEQ ID NO: 9439 - RNA, 21 nt, synthetic construct
  source 1..21: mol_type = other RNA
ttcccacctcagatggctgct

SEQ ID NO: 9440 - RNA, 21 nt, synthetic construct
  source 1..21: mol_type = other RNA
ttcccacgggaaaggcaaccc

SEQ ID NO: 9441 - RNA, 21 nt, synthetic construct
  source 1..21: mol_type = other RNA
ttcccaggaaagggggtgaag

SEQ ID NO: 9442 - RNA, 21 nt, synthetic construct
  source 1..21: mol_type = other RNA
ttcccagggagagagatcccc

SEQ ID NO: 9443 - RNA, 21 nt, synthetic construct
  source 1..21: mol_type = other RNA
ttcccctcccccaacgcctct

SEQ ID NO: 9444 - RNA, 21 nt, synthetic construct
  source 1..21: mol_type = other RNA
ttcccgacttacacgcagagg

SEQ ID NO: 9445 - RNA, 21 nt, synthetic construct
  source 1..21: mol_type = other RNA
ttcccgacttcccacgggaaa

SEQ ID NO: 9446 - RNA, 21 nt, synthetic construct
  source 1..21: mol_type = other RNA
ttcccggccaggaaacgccgt

SEQ ID NO: 9447 - RNA, 21 nt, synthetic construct
  source 1..21: mol_type = other RNA
ttcccgtgggaagtcgggaac

SEQ ID NO: 9448 - RNA, 21 nt, synthetic construct
  source 1..21: mol_type = other RNA
ttccctcccaacgtaacaaac

SEQ ID NO: 9449 - RNA, 21 nt, synthetic construct
  source 1..21: mol_type = other RNA
ttccctcccctggggcccgat

SEQ ID NO: 9450 - RNA, 21 nt, synthetic construct
  source 1..21: mol_type = other RNA
ttccctctcatgcgatttacc

SEQ ID NO: 9451 - RNA, 21 nt, synthetic construct
  source 1..21: mol_type = other RNA
ttccctctcgttttctggctt

SEQ ID NO: 9452 - RNA, 21 nt, synthetic construct
  source 1..21: mol_type = other RNA
ttccctctgcgtgtaagtcgg

SEQ ID NO: 9453 - RNA, 21 nt, synthetic construct
  source 1..21: mol_type = other RNA
ttcccttgaggagaggcctct

SEQ ID NO: 9454 - RNA, 21 nt, synthetic construct
  source 1..21: mol_type = other RNA
ttccctttatgaattctcttt

SEQ ID NO: 9455 - RNA, 21 nt, synthetic construct
  source 1..21: mol_type = other RNA
ttccgctcccctacctagccg

SEQ ID NO: 9456 - RNA, 21 nt, synthetic construct
  source 1..21: mol_type = other RNA
ttccgctcccttctccctccc

SEQ ID NO: 9457 - RNA, 21 nt, synthetic construct
  source 1..21: mol_type = other RNA
ttccgctcgggcagcgggctg

SEQ ID NO: 9458 - RNA, 21 nt, synthetic construct
  source 1..21: mol_type = other RNA
ttccgctgattggcggcgagt

SEQ ID NO: 9459 - RNA, 21 nt, synthetic construct
  source 1..21: mol_type = other RNA
ttccggctagcctcttgtcgc

SEQ ID NO: 9460 - RNA, 21 nt, synthetic construct
  source 1..21: mol_type = other RNA
ttcctacactcctcttcacat

SEQ ID NO: 9461 - RNA, 21 nt, synthetic construct
  source 1..21: mol_type = other RNA
ttcctgccacgttgcgcaggg

SEQ ID NO: 9462 - RNA, 21 nt, synthetic construct
  source 1..21: mol_type = other RNA
ttcctggacgccttccctctc

SEQ ID NO: 9463 - RNA, 21 nt, synthetic construct
  source 1..21: mol_type = other RNA
ttcctggccgggaatggcccg

SEQ ID NO: 9464 - RNA, 21 nt, synthetic construct
  source 1..21: mol_type = other RNA
ttcctgggaactgcctactcc

SEQ ID NO: 9465 - RNA, 21 nt, synthetic construct
  source 1..21: mol_type = other RNA
ttcctgggtcaggacgcttcc

SEQ ID NO: 9466 - RNA, 21 nt, synthetic construct
  source 1..21: mol_type = other RNA
ttccttcgggggagtcggttt

SEQ ID NO: 9467 - RNA, 21 nt, synthetic construct
  source 1..21: mol_type = other RNA
ttcgacacctgattggctgtc

SEQ ID NO: 9468 - RNA, 21 nt, synthetic construct
  source 1..21: mol_type = other RNA
ttcgacagccaatcaggtgtc

SEQ ID NO: 9469 - RNA, 21 nt, synthetic construct
  source 1..21: mol_type = other RNA
ttcgagcattttccgctccct

SEQ ID NO: 9470 - RNA, 21 nt, synthetic construct
  source 1..21: mol_type = other RNA
ttcgagcctggagttgagcca

SEQ ID NO: 9471 - RNA, 21 nt, synthetic construct
  source 1..21: mol_type = other RNA
ttcgagcggagggcagcaaga

SEQ ID NO: 9472 - RNA, 21 nt, synthetic construct
  source 1..21: mol_type = other RNA
ttcgccacccccaccacacgt

SEQ ID NO: 9473 - RNA, 21 nt, synthetic construct
  source 1..21: mol_type = other RNA
ttcgctcatgtgagactcgag

SEQ ID NO: 9474 - RNA, 21 nt, synthetic construct
  source 1..21: mol_type = other RNA
ttcggcgctccggctcctcag

SEQ ID NO: 9475 - RNA, 21 nt, synthetic construct
  source 1..21: mol_type = other RNA
ttcgggggagtcggtttaccc

SEQ ID NO: 9476 - RNA, 21 nt, synthetic construct
  source 1..21: mol_type = other RNA
ttcggtctcttttctgtcgga

SEQ ID NO: 9477 - RNA, 21 nt, synthetic construct
  source 1..21: mol_type = other RNA
ttctatagagtccttgcttgt

SEQ ID NO: 9478 - RNA, 21 nt, synthetic construct
  source 1..21: mol_type = other RNA
ttctatgctaattgattctat

SEQ ID NO: 9479 - RNA, 21 nt, synthetic construct
  source 1..21: mol_type = other RNA
ttctcacaagatcgttctcca

SEQ ID NO: 9480 - RNA, 21 nt, synthetic construct
  source 1..21: mol_type = other RNA
ttctcacccccctcgccgcct

SEQ ID NO: 9481 - RNA, 21 nt, synthetic construct
  source 1..21: mol_type = other RNA
ttctccacgcccaaggcaagt

SEQ ID NO: 9482 - RNA, 21 nt, synthetic construct
  source 1..21: mol_type = other RNA
ttctccctccccctccggttg

SEQ ID NO: 9483 - RNA, 21 nt, synthetic construct
  source 1..21: mol_type = other RNA
ttctcctcccgccgtgtgtga

SEQ ID NO: 9484 - RNA, 21 nt, synthetic construct
  source 1..21: mol_type = other RNA
ttctcgcggccttgtgacaga

SEQ ID NO: 9485 - RNA, 21 nt, synthetic construct
  source 1..21: mol_type = other RNA
ttctctaggcggccccggcgg

SEQ ID NO: 9486 - RNA, 21 nt, synthetic construct
  source 1..21: mol_type = other RNA
ttctctccccgatcccccact

SEQ ID NO: 9487 - RNA, 21 nt, synthetic construct
  source 1..21: mol_type = other RNA
ttctctggctccccgtggcgt

SEQ ID NO: 9488 - RNA, 21 nt, synthetic construct
  source 1..21: mol_type = other RNA
ttctctttccctctgcgtgta

SEQ ID NO: 9489 - RNA, 21 nt, synthetic construct
  source 1..21: mol_type = other RNA
ttctgccccccacccccacct

SEQ ID NO: 9490 - RNA, 21 nt, synthetic construct
  source 1..21: mol_type = other RNA
ttctgcctttgaagatattct

SEQ ID NO: 9491 - RNA, 21 nt, synthetic construct
  source 1..21: mol_type = other RNA
ttctggatggcggcggccgcg

SEQ ID NO: 9492 - RNA, 21 nt, synthetic construct
  source 1..21: mol_type = other RNA
ttctggcttcccacctcagat

SEQ ID NO: 9493 - RNA, 21 nt, synthetic construct
  source 1..21: mol_type = other RNA
ttctggttggagtaaagctcc

SEQ ID NO: 9494 - RNA, 21 nt, synthetic construct
  source 1..21: mol_type = other RNA
ttctgtcggacccttaccttg

SEQ ID NO: 9495 - RNA, 21 nt, synthetic construct
  source 1..21: mol_type = other RNA
ttcttgggcgtcagtggtctt

SEQ ID NO: 9496 - RNA, 21 nt, synthetic construct
  source 1..21: mol_type = other RNA
ttgaaccagggctctttccta

SEQ ID NO: 9497 - RNA, 21 nt, synthetic construct
  source 1..21: mol_type = other RNA
ttgaagatattctcacaagat

SEQ ID NO: 9498 - RNA, 21 nt, synthetic construct
  source 1..21: mol_type = other RNA
ttgaatgtgtagggttcgagc

SEQ ID NO: 9499 - RNA, 21 nt, synthetic construct
  source 1..21: mol_type = other RNA
ttgagccagattgtgtcgttt

SEQ ID NO: 9500 - RNA, 21 nt, synthetic construct
  source 1..21: mol_type = other RNA
ttgaggagaggcctcttgctg

SEQ ID NO: 9501 - RNA, 21 nt, synthetic construct
  source 1..21: mol_type = other RNA
ttgattctatagagtccttgc

SEQ ID NO: 9502 - RNA, 21 nt, synthetic construct
  source 1..21: mol_type = other RNA
ttgcaacaccccattttccca

SEQ ID NO: 9503 - RNA, 21 nt, synthetic construct
  source 1..21: mol_type = other RNA
ttgcaacggtgtgtgcaaggc

SEQ ID NO: 9504 - RNA, 21 nt, synthetic construct
  source 1..21: mol_type = other RNA
ttgcacacaccgttgcaacac

SEQ ID NO: 9505 - RNA, 21 nt, synthetic construct
  source 1..21: mol_type = other RNA
ttgccccctgggtggggcggg

SEQ ID NO: 9506 - RNA, 21 nt, synthetic construct
  source 1..21: mol_type = other RNA
ttgccgcagggcgggcctccc

SEQ ID NO: 9507 - RNA, 21 nt, synthetic construct
  source 1..21: mol_type = other RNA
ttgccttgggcgtggagaacg

SEQ ID NO: 9508 - RNA, 21 nt, synthetic construct
  source 1..21: mol_type = other RNA
ttgcctttcccgtgggaagtc

SEQ ID NO: 9509 - RNA, 21 nt, synthetic construct
  source 1..21: mol_type = other RNA
ttgcgcaggggcgcggggcca

SEQ ID NO: 9510 - RNA, 21 nt, synthetic construct
  source 1..21: mol_type = other RNA
ttgcgggggttgcctttcccg

SEQ ID NO: 9511 - RNA, 21 nt, synthetic construct
  source 1..21: mol_type = other RNA
ttgctactggctcgagtctca

SEQ ID NO: 9512 - RNA, 21 nt, synthetic construct
  source 1..21: mol_type = other RNA
ttgctctcgcagagggaggag

SEQ ID NO: 9513 - RNA, 21 nt, synthetic construct
  source 1..21: mol_type = other RNA
ttgctgccctccgctcgaaat

SEQ ID NO: 9514 - RNA, 21 nt, synthetic construct
  source 1..21: mol_type = other RNA
ttgcttgtctcacttcttggg

SEQ ID NO: 9515 - RNA, 21 nt, synthetic construct
  source 1..21: mol_type = other RNA
ttggagtaaagctcctgtcag

SEQ ID NO: 9516 - RNA, 21 nt, synthetic construct
  source 1..21: mol_type = other RNA
ttggcccactcgccgccaatc

SEQ ID NO: 9517 - RNA, 21 nt, synthetic construct
  source 1..21: mol_type = other RNA
ttggccgtttctcctcccgcc

SEQ ID NO: 9518 - RNA, 21 nt, synthetic construct
  source 1..21: mol_type = other RNA
ttggcctctccgcccaccgcc

SEQ ID NO: 9519 - RNA, 21 nt, synthetic construct
  source 1..21: mol_type = other RNA
ttggcggactggcgggactgg

SEQ ID NO: 9520 - RNA, 21 nt, synthetic construct
  source 1..21: mol_type = other RNA
ttggcggcgagtgggccaatg

SEQ ID NO: 9521 - RNA, 21 nt, synthetic construct
  source 1..21: mol_type = other RNA
ttggctcgctccgcctttctg

SEQ ID NO: 9522 - RNA, 21 nt, synthetic construct
  source 1..21: mol_type = other RNA
ttggctgtcgaagctgtggga

SEQ ID NO: 9523 - RNA, 21 nt, synthetic construct
  source 1..21: mol_type = other RNA
ttgggaaagccccttctatgc

SEQ ID NO: 9524 - RNA, 21 nt, synthetic construct
  source 1..21: mol_type = other RNA
ttgggaagcagccatctgagg

SEQ ID NO: 9525 - RNA, 21 nt, synthetic construct
  source 1..21: mol_type = other RNA
ttgggagggaaaggggtggct

SEQ ID NO: 9526 - RNA, 21 nt, synthetic construct
  source 1..21: mol_type = other RNA
ttgggcctaactcgagtcctg

SEQ ID NO: 9527 - RNA, 21 nt, synthetic construct
  source 1..21: mol_type = other RNA
ttgggcgtcagtggtctttct

SEQ ID NO: 9528 - RNA, 21 nt, synthetic construct
  source 1..21: mol_type = other RNA
ttgggcgtggagaacgatctt

SEQ ID NO: 9529 - RNA, 21 nt, synthetic construct
  source 1..21: mol_type = other RNA
ttggggagggccaggcccacg

SEQ ID NO: 9530 - RNA, 21 nt, synthetic construct
  source 1..21: mol_type = other RNA
ttgggggaggggaagcgtcct

SEQ ID NO: 9531 - RNA, 21 nt, synthetic construct
  source 1..21: mol_type = other RNA
ttgggtcgcctagattagagg

SEQ ID NO: 9532 - RNA, 21 nt, synthetic construct
  source 1..21: mol_type = other RNA
ttgggtcgtgggcctggccct

SEQ ID NO: 9533 - RNA, 21 nt, synthetic construct
  source 1..21: mol_type = other RNA
ttggtacggtcctccccgagg

SEQ ID NO: 9534 - RNA, 21 nt, synthetic construct
  source 1..21: mol_type = other RNA
ttgtcccaggcgctgccgggg

SEQ ID NO: 9535 - RNA, 21 nt, synthetic construct
  source 1..21: mol_type = other RNA
ttgtcgccgattggccgtttc

SEQ ID NO: 9536 - RNA, 21 nt, synthetic construct
  source 1..21: mol_type = other RNA
ttgtctcacttcttgggcgtc

SEQ ID NO: 9537 - RNA, 21 nt, synthetic construct
  source 1..21: mol_type = other RNA
ttgtctcgcccttcaggcggt

SEQ ID NO: 9538 - RNA, 21 nt, synthetic construct
  source 1..21: mol_type = other RNA
ttgtctgtcacaaggccgcga

SEQ ID NO: 9539 - RNA, 21 nt, synthetic construct
  source 1..21: mol_type = other RNA
ttgtcttcgacacctgattgg

SEQ ID NO: 9540 - RNA, 21 nt, synthetic construct
  source 1..21: mol_type = other RNA
ttgtgacagacaactctgatc

SEQ ID NO: 9541 - RNA, 21 nt, synthetic construct
  source 1..21: mol_type = other RNA
ttgtgagaatatcttcaaagg

SEQ ID NO: 9542 - RNA, 21 nt, synthetic construct
  source 1..21: mol_type = other RNA
ttgtgtcgttttacttgcctt

SEQ ID NO: 9543 - RNA, 21 nt, synthetic construct
  source 1..21: mol_type = other RNA
ttgtgttttcacacacggcgg

SEQ ID NO: 9544 - RNA, 21 nt, synthetic construct
  source 1..21: mol_type = other RNA
ttgttacgttgggagggaaag

SEQ ID NO: 9545 - RNA, 21 nt, synthetic construct
  source 1..21: mol_type = other RNA
tttaactttccctctcatgcg

SEQ ID NO: 9546 - RNA, 21 nt, synthetic construct
  source 1..21: mol_type = other RNA
tttacccgccgcctgcttgtc

SEQ ID NO: 9547 - RNA, 21 nt, synthetic construct
  source 1..21: mol_type = other RNA
tttacctacttgaaccagggc

SEQ ID NO: 9548 - RNA, 21 nt, synthetic construct
  source 1..21: mol_type = other RNA
tttacctttcccttgaggaga

SEQ ID NO: 9549 - RNA, 21 nt, synthetic construct
  source 1..21: mol_type = other RNA
tttactccaaccagaatacgc

SEQ ID NO: 9550 - RNA, 21 nt, synthetic construct
  source 1..21: mol_type = other RNA
tttacttgccttgggcgtgga

SEQ ID NO: 9551 - RNA, 21 nt, synthetic construct
  source 1..21: mol_type = other RNA
tttatgaattctctttccctc

SEQ ID NO: 9552 - RNA, 21 nt, synthetic construct
  source 1..21: mol_type = other RNA
tttcacacacggcgggaggag

SEQ ID NO: 9553 - RNA, 21 nt, synthetic construct
  source 1..21: mol_type = other RNA
tttcactgaccctcccctccc

SEQ ID NO: 9554 - RNA, 21 nt, synthetic construct
  source 1..21: mol_type = other RNA
tttcatgtttttcctgggtca

SEQ ID NO: 9555 - RNA, 21 nt, synthetic construct
  source 1..21: mol_type = other RNA
tttcccaacagtttaactttc

SEQ ID NO: 9556 - RNA, 21 nt, synthetic construct
  source 1..21: mol_type = other RNA
tttcccagggagagagatccc

SEQ ID NO: 9557 - RNA, 21 nt, synthetic construct
  source 1..21: mol_type = other RNA
tttcccgtgggaagtcgggaa

SEQ ID NO: 9558 - RNA, 21 nt, synthetic construct
  source 1..21: mol_type = other RNA
tttccctcccaacgtaacaaa

SEQ ID NO: 9559 - RNA, 21 nt, synthetic construct
  source 1..21: mol_type = other RNA
tttccctctcatgcgatttac

SEQ ID NO: 9560 - RNA, 21 nt, synthetic construct
  source 1..21: mol_type = other RNA
tttccctctgcgtgtaagtcg

SEQ ID NO: 9561 - RNA, 21 nt, synthetic construct
  source 1..21: mol_type = other RNA
tttcccttgaggagaggcctc

SEQ ID NO: 9562 - RNA, 21 nt, synthetic construct
  source 1..21: mol_type = other RNA
tttccgctcccttctccctcc

SEQ ID NO: 9563 - RNA, 21 nt, synthetic construct
  source 1..21: mol_type = other RNA
tttccgctcgggcagcgggct

SEQ ID NO: 9564 - RNA, 21 nt, synthetic construct
  source 1..21: mol_type = other RNA
tttcctacactcctcttcaca

SEQ ID NO: 9565 - RNA, 21 nt, synthetic construct
  source 1..21: mol_type = other RNA
tttcctggccgggaatggccc

SEQ ID NO: 9566 - RNA, 21 nt, synthetic construct
  source 1..21: mol_type = other RNA
tttcctgggaactgcctactc

SEQ ID NO: 9567 - RNA, 21 nt, synthetic construct
  source 1..21: mol_type = other RNA
tttcctgggtcaggacgcttc

SEQ ID NO: 9568 - RNA, 21 nt, synthetic construct
  source 1..21: mol_type = other RNA
tttcgagcattttccgctccc

SEQ ID NO: 9569 - RNA, 21 nt, synthetic construct
  source 1..21: mol_type = other RNA
tttcgagcggagggcagcaag

SEQ ID NO: 9570 - RNA, 21 nt, synthetic construct
  source 1..21: mol_type = other RNA
tttcgctcatgtgagactcga

SEQ ID NO: 9571 - RNA, 21 nt, synthetic construct
  source 1..21: mol_type = other RNA
tttctcctcccgccgtgtgtg

SEQ ID NO: 9572 - RNA, 21 nt, synthetic construct
  source 1..21: mol_type = other RNA
tttctctccccgatcccccac

SEQ ID NO: 9573 - RNA, 21 nt, synthetic construct
  source 1..21: mol_type = other RNA
tttctgccccccacccccacc

SEQ ID NO: 9574 - RNA, 21 nt, synthetic construct
  source 1..21: mol_type = other RNA
tttctgcctttgaagatattc

SEQ ID NO: 9575 - RNA, 21 nt, synthetic construct
  source 1..21: mol_type = other RNA
tttctggcttcccacctcaga

SEQ ID NO: 9576 - RNA, 21 nt, synthetic construct
  source 1..21: mol_type = other RNA
tttctgtcggacccttacctt

SEQ ID NO: 9577 - RNA, 21 nt, synthetic construct
  source 1..21: mol_type = other RNA
tttgaagatattctcacaaga

SEQ ID NO: 9578 - RNA, 21 nt, synthetic construct
  source 1..21: mol_type = other RNA
tttggctcgctccgcctttct

SEQ ID NO: 9579 - RNA, 21 nt, synthetic construct
  source 1..21: mol_type = other RNA
tttgggaagcagccatctgag

SEQ ID NO: 9580 - RNA, 21 nt, synthetic construct
  source 1..21: mol_type = other RNA
tttgtgttttcacacacggcg

SEQ ID NO: 9581 - RNA, 21 nt, synthetic construct
  source 1..21: mol_type = other RNA
tttgttacgttgggagggaaa

SEQ ID NO: 9582 - RNA, 21 nt, synthetic construct
  source 1..21: mol_type = other RNA
ttttacttgccttgggcgtgg

SEQ ID NO: 9583 - RNA, 21 nt, synthetic construct
  source 1..21: mol_type = other RNA
ttttcacacacggcgggagga

SEQ ID NO: 9584 - RNA, 21 nt, synthetic construct
  source 1..21: mol_type = other RNA
ttttcccagggagagagatcc

SEQ ID NO: 9585 - RNA, 21 nt, synthetic construct
  source 1..21: mol_type = other RNA
ttttccgctcccttctccctc

SEQ ID NO: 9586 - RNA, 21 nt, synthetic construct
  source 1..21: mol_type = other RNA
ttttcctgggtcaggacgctt

SEQ ID NO: 9587 - RNA, 21 nt, synthetic construct
  source 1..21: mol_type = other RNA
ttttctctccccgatccccca

SEQ ID NO: 9588 - RNA, 21 nt, synthetic construct
  source 1..21: mol_type = other RNA
ttttctgcctttgaagatatt

SEQ ID NO: 9589 - RNA, 21 nt, synthetic construct
  source 1..21: mol_type = other RNA
ttttctggcttcccacctcag

SEQ ID NO: 9590 - RNA, 21 nt, synthetic construct
  source 1..21: mol_type = other RNA
ttttctgtcggacccttacct

SEQ ID NO: 9591 - RNA, 21 nt, synthetic construct
  source 1..21: mol_type = other RNA
tttttcctgggtcaggacgct

SEQ ID NO: 9592 - RNA, 21 nt, synthetic construct
  source 1..21: mol_type = other RNA
tttttctctccccgatccccc

SEQ ID NO: 9593 - RNA, 21 nt, synthetic construct
  source 1..21: mol_type = other RNA
tttttctgcctttgaagatat

SEQ ID NO: 9594 - RNA, 21 nt, synthetic construct
  source 1..21: mol_type = other RNA
ttttttctctccccgatcccc

SEQ ID NO: 9595 - RNA, 22 nt, synthetic construct
  source 1..22: mol_type = other RNA
aaaaaagtatgcctgtgtattt

SEQ ID NO: 9596 - RNA, 22 nt, synthetic construct
  source 1..22: mol_type = other RNA
aaaaacatgaaagggggagttg

SEQ ID NO: 9597 - RNA, 22 nt, synthetic construct
  source 1..22: mol_type = other RNA
aaaaagtatgcctgtgtatttc

SEQ ID NO: 9598 - RNA, 22 nt, synthetic construct
  source 1..22: mol_type = other RNA
aaaaatattccctttatgaatt

SEQ ID NO: 9599 - RNA, 22 nt, synthetic construct
  source 1..22: mol_type = other RNA
aaaacacaaatggcgtattctg

SEQ ID NO: 9600 - RNA, 22 nt, synthetic construct
  source 1..22: mol_type = other RNA
aaaacatgaaagggggagttgg

SEQ ID NO: 9601 - RNA, 22 nt, synthetic construct
  source 1..22: mol_type = other RNA
aaaacgacacaatctggctcaa

SEQ ID NO: 9602 - RNA, 22 nt, synthetic construct
  source 1..22: mol_type = other RNA
aaaacgagagggaaggcgtcca

SEQ ID NO: 9603 - RNA, 22 nt, synthetic construct
  source 1..22: mol_type = other RNA
aaaagagaccgaacctcacgat

SEQ ID NO: 9604 - RNA, 22 nt, synthetic construct
  source 1..22: mol_type = other RNA
aaaagtatgcctgtgtatttcg

SEQ ID NO: 9605 - RNA, 22 nt, synthetic construct
  source 1..22: mol_type = other RNA
aaaatattccctttatgaattc

SEQ ID NO: 9606 - RNA, 22 nt, synthetic construct
  source 1..22: mol_type = other RNA
aaaatgctcgaaaccggacgga

SEQ ID NO: 9607 - RNA, 22 nt, synthetic construct
  source 1..22: mol_type = other RNA
aaaatggggtgttgcaacggtg

SEQ ID NO: 9608 - RNA, 22 nt, synthetic construct
  source 1..22: mol_type = other RNA
aaacacaaatggcgtattctgg

SEQ ID NO: 9609 - RNA, 22 nt, synthetic construct
  source 1..22: mol_type = other RNA
aaacatgaaagggggagttggg

SEQ ID NO: 9610 - RNA, 22 nt, synthetic construct
  source 1..22: mol_type = other RNA
aaacattatgttcccgacttcc

SEQ ID NO: 9611 - RNA, 22 nt, synthetic construct
  source 1..22: mol_type = other RNA
aaaccactgcgcggggcgcggg

SEQ ID NO: 9612 - RNA, 22 nt, synthetic construct
  source 1..22: mol_type = other RNA
aaaccagccggaccgacccccg

SEQ ID NO: 9613 - RNA, 22 nt, synthetic construct
  source 1..22: mol_type = other RNA
aaaccgactcccccgaaggaag

SEQ ID NO: 9614 - RNA, 22 nt, synthetic construct
  source 1..22: mol_type = other RNA
aaaccggacggagccattgctc

SEQ ID NO: 9615 - RNA, 22 nt, synthetic construct
  source 1..22: mol_type = other RNA
aaacgacacaatctggctcaac

SEQ ID NO: 9616 - RNA, 22 nt, synthetic construct
  source 1..22: mol_type = other RNA
aaacgagagggaaggcgtccag

SEQ ID NO: 9617 - RNA, 22 nt, synthetic construct
  source 1..22: mol_type = other RNA
aaacgccactgaccgcacgggg

SEQ ID NO: 9618 - RNA, 22 nt, synthetic construct
  source 1..22: mol_type = other RNA
aaacgccgtggcgccgcgttgg

SEQ ID NO: 9619 - RNA, 22 nt, synthetic construct
  source 1..22: mol_type = other RNA
aaacggccaatcggcgacaaga

SEQ ID NO: 9620 - RNA, 22 nt, synthetic construct
  source 1..22: mol_type = other RNA
aaacgtggagtaggcagttccc

SEQ ID NO: 9621 - RNA, 22 nt, synthetic construct
  source 1..22: mol_type = other RNA
aaactgttgggaaagccccttc

SEQ ID NO: 9622 - RNA, 22 nt, synthetic construct
  source 1..22: mol_type = other RNA
aaagaccactgacgcccaagaa

SEQ ID NO: 9623 - RNA, 22 nt, synthetic construct
  source 1..22: mol_type = other RNA
aaagagaccgaacctcacgatc

SEQ ID NO: 9624 - RNA, 22 nt, synthetic construct
  source 1..22: mol_type = other RNA
aaagagccctggttcaagtagg

SEQ ID NO: 9625 - RNA, 22 nt, synthetic construct
  source 1..22: mol_type = other RNA
aaagaggggggccggcactact

SEQ ID NO: 9626 - RNA, 22 nt, synthetic construct
  source 1..22: mol_type = other RNA
aaagccccttctatgctaattg

SEQ ID NO: 9627 - RNA, 22 nt, synthetic construct
  source 1..22: mol_type = other RNA
aaagctcctgtcagttacgccg

SEQ ID NO: 9628 - RNA, 22 nt, synthetic construct
  source 1..22: mol_type = other RNA
aaaggcaacccccgcaagccac

SEQ ID NO: 9629 - RNA, 22 nt, synthetic construct
  source 1..22: mol_type = other RNA
aaaggcagaaaaatattccctt

SEQ ID NO: 9630 - RNA, 22 nt, synthetic construct
  source 1..22: mol_type = other RNA
aaaggcattaccttcgccaccc

SEQ ID NO: 9631 - RNA, 22 nt, synthetic construct
  source 1..22: mol_type = other RNA
aaaggcggagcgagccaaaggc

SEQ ID NO: 9632 - RNA, 22 nt, synthetic construct
  source 1..22: mol_type = other RNA
aaagggaatatttttctgcctt

SEQ ID NO: 9633 - RNA, 22 nt, synthetic construct
  source 1..22: mol_type = other RNA
aaagggggagttgggtcgccta

SEQ ID NO: 9634 - RNA, 22 nt, synthetic construct
  source 1..22: mol_type = other RNA
aaagggggtgaagaggcgttgg

SEQ ID NO: 9635 - RNA, 22 nt, synthetic construct
  source 1..22: mol_type = other RNA
aaaggggtggctggatgcaggc

SEQ ID NO: 9636 - RNA, 22 nt, synthetic construct
  source 1..22: mol_type = other RNA
aaaggtaaacgtggagtaggca

SEQ ID NO: 9637 - RNA, 22 nt, synthetic construct
  source 1..22: mol_type = other RNA
aaagtatgcctgtgtatttcga

SEQ ID NO: 9638 - RNA, 22 nt, synthetic construct
  source 1..22: mol_type = other RNA
aaagttaaactgttgggaaagc

SEQ ID NO: 9639 - RNA, 22 nt, synthetic construct
  source 1..22: mol_type = other RNA
aaatattccctttatgaattct

SEQ ID NO: 9640 - RNA, 22 nt, synthetic construct
  source 1..22: mol_type = other RNA
aaatcgcatgagagggaaagtt

SEQ ID NO: 9641 - RNA, 22 nt, synthetic construct
  source 1..22: mol_type = other RNA
aaatcggctctggcgcgggcgt

SEQ ID NO: 9642 - RNA, 22 nt, synthetic construct
  source 1..22: mol_type = other RNA
aaatgctcgaaaccggacggag

SEQ ID NO: 9643 - RNA, 22 nt, synthetic construct
  source 1..22: mol_type = other RNA
aaatggcgtattctggttggag

SEQ ID NO: 9644 - RNA, 22 nt, synthetic construct
  source 1..22: mol_type = other RNA
aaatggggtgttgcaacggtgt

SEQ ID NO: 9645 - RNA, 22 nt, synthetic construct
  source 1..22: mol_type = other RNA
aacaaacattatgttcccgact

SEQ ID NO: 9646 - RNA, 22 nt, synthetic construct
  source 1..22: mol_type = other RNA
aacacaaatggcgtattctggt

SEQ ID NO: 9647 - RNA, 22 nt, synthetic construct
  source 1..22: mol_type = other RNA
aacacagtagtgccggcccccc

SEQ ID NO: 9648 - RNA, 22 nt, synthetic construct
  source 1..22: mol_type = other RNA
aacaccccattttcccagggag

SEQ ID NO: 9649 - RNA, 22 nt, synthetic construct
  source 1..22: mol_type = other RNA
aacagtttaactttccctctca

SEQ ID NO: 9650 - RNA, 22 nt, synthetic construct
  source 1..22: mol_type = other RNA
aacataatgtttgttacgttgg

SEQ ID NO: 9651 - RNA, 22 nt, synthetic construct
  source 1..22: mol_type = other RNA
aacatgaaagggggagttgggt

SEQ ID NO: 9652 - RNA, 22 nt, synthetic construct
  source 1..22: mol_type = other RNA
aacattatgttcccgacttccc

SEQ ID NO: 9653 - RNA, 22 nt, synthetic construct
  source 1..22: mol_type = other RNA
aaccagaatacgccatttgtgt

SEQ ID NO: 9654 - RNA, 22 nt, synthetic construct
  source 1..22: mol_type = other RNA
aaccagccggaccgacccccgc

SEQ ID NO: 9655 - RNA, 22 nt, synthetic construct
  source 1..22: mol_type = other RNA
aaccagggctctttcctacact

SEQ ID NO: 9656 - RNA, 22 nt, synthetic construct
  source 1..22: mol_type = other RNA
aacccccgcaagccaccagacg

SEQ ID NO: 9657 - RNA, 22 nt, synthetic construct
  source 1..22: mol_type = other RNA
aaccctacacattcaacgaggc

SEQ ID NO: 9658 - RNA, 22 nt, synthetic construct
  source 1..22: mol_type = other RNA
aaccgactcccccgaaggaagg

SEQ ID NO: 9659 - RNA, 22 nt, synthetic construct
  source 1..22: mol_type = other RNA
aaccggacggagccattgctct

SEQ ID NO: 9660 - RNA, 22 nt, synthetic construct
  source 1..22: mol_type = other RNA
aaccggagggggagggagaagg

SEQ ID NO: 9661 - RNA, 22 nt, synthetic construct
  source 1..22: mol_type = other RNA
aacctcacgatcgggccccagg

SEQ ID NO: 9662 - RNA, 22 nt, synthetic construct
  source 1..22: mol_type = other RNA
aacgacacaatctggctcaact

SEQ ID NO: 9663 - RNA, 22 nt, synthetic construct
  source 1..22: mol_type = other RNA
aacgagagggaaggcgtccagg

SEQ ID NO: 9664 - RNA, 22 nt, synthetic construct
  source 1..22: mol_type = other RNA
aacgaggctatctcagacacgc

SEQ ID NO: 9665 - RNA, 22 nt, synthetic construct
  source 1..22: mol_type = other RNA
aacgatcttgtgagaatatctt

SEQ ID NO: 9666 - RNA, 22 nt, synthetic construct
  source 1..22: mol_type = other RNA
aacgccactgaccgcacgggga

SEQ ID NO: 9667 - RNA, 22 nt, synthetic construct
  source 1..22: mol_type = other RNA
aacgccgtggcgccgcgttggg

SEQ ID NO: 9668 - RNA, 22 nt, synthetic construct
  source 1..22: mol_type = other RNA
aacgcctcttcaccccctttcc

SEQ ID NO: 9669 - RNA, 22 nt, synthetic construct
  source 1..22: mol_type = other RNA
aacgcgagagtcgctaagcggc

SEQ ID NO: 9670 - RNA, 22 nt, synthetic construct
  source 1..22: mol_type = other RNA
aacgcggcgccacggcgtttcc

SEQ ID NO: 9671 - RNA, 22 nt, synthetic construct
  source 1..22: mol_type = other RNA
aacggccaatcggcgacaagag

SEQ ID NO: 9672 - RNA, 22 nt, synthetic construct
  source 1..22: mol_type = other RNA
aacgggggtagggagtggggga

SEQ ID NO: 9673 - RNA, 22 nt, synthetic construct
  source 1..22: mol_type = other RNA
aacggtgtgtgcaaggcggcga

SEQ ID NO: 9674 - RNA, 22 nt, synthetic construct
  source 1..22: mol_type = other RNA
aacgtaacaaacattatgttcc

SEQ ID NO: 9675 - RNA, 22 nt, synthetic construct
  source 1..22: mol_type = other RNA
aacgtggagtaggcagttccca

SEQ ID NO: 9676 - RNA, 22 nt, synthetic construct
  source 1..22: mol_type = other RNA
aacgtggcaggaagcgcgcgct

SEQ ID NO: 9677 - RNA, 22 nt, synthetic construct
  source 1..22: mol_type = other RNA
aacgtgtggtgggggtggcgaa

SEQ ID NO: 9678 - RNA, 22 nt, synthetic construct
  source 1..22: mol_type = other RNA
aactccaggctcgaaccctaca

SEQ ID NO: 9679 - RNA, 22 nt, synthetic construct
  source 1..22: mol_type = other RNA
aactccccctttcatgtttttc

SEQ ID NO: 9680 - RNA, 22 nt, synthetic construct
  source 1..22: mol_type = other RNA
aactcgagtcctgccgcctccc

SEQ ID NO: 9681 - RNA, 22 nt, synthetic construct
  source 1..22: mol_type = other RNA
aactctgatcgctctgggggcc

SEQ ID NO: 9682 - RNA, 22 nt, synthetic construct
  source 1..22: mol_type = other RNA
aactctggtgggaggggaggtg

SEQ ID NO: 9683 - RNA, 22 nt, synthetic construct
  source 1..22: mol_type = other RNA
aactgacaggagctttactcca

SEQ ID NO: 9684 - RNA, 22 nt, synthetic construct
  source 1..22: mol_type = other RNA
aactgcctactccacgtttacc

SEQ ID NO: 9685 - RNA, 22 nt, synthetic construct
  source 1..22: mol_type = other RNA
aactgttgggaaagccccttct

SEQ ID NO: 9686 - RNA, 22 nt, synthetic construct
  source 1..22: mol_type = other RNA
aactttccctctcatgcgattt

SEQ ID NO: 9687 - RNA, 22 nt, synthetic construct
  source 1..22: mol_type = other RNA
aagaagtgagacaagcaaggac

SEQ ID NO: 9688 - RNA, 22 nt, synthetic construct
  source 1..22: mol_type = other RNA
aagacaagcaggcggcgggtaa

SEQ ID NO: 9689 - RNA, 22 nt, synthetic construct
  source 1..22: mol_type = other RNA
aagaccactgacgcccaagaag

SEQ ID NO: 9690 - RNA, 22 nt, synthetic construct
  source 1..22: mol_type = other RNA
aagagaaagaccactgacgccc

SEQ ID NO: 9691 - RNA, 22 nt, synthetic construct
  source 1..22: mol_type = other RNA
aagagaattcataaagggaata

SEQ ID NO: 9692 - RNA, 22 nt, synthetic construct
  source 1..22: mol_type = other RNA
aagagaccgaacctcacgatcg

SEQ ID NO: 9693 - RNA, 22 nt, synthetic construct
  source 1..22: mol_type = other RNA
aagagccctggttcaagtaggt

SEQ ID NO: 9694 - RNA, 22 nt, synthetic construct
  source 1..22: mol_type = other RNA
aagagcttggggagggccaggc

SEQ ID NO: 9695 - RNA, 22 nt, synthetic construct
  source 1..22: mol_type = other RNA
aagaggagtgtaggaaagagcc

SEQ ID NO: 9696 - RNA, 22 nt, synthetic construct
  source 1..22: mol_type = other RNA
aagaggcctctcctcaagggaa

SEQ ID NO: 9697 - RNA, 22 nt, synthetic construct
  source 1..22: mol_type = other RNA
aagaggcgttgggggaggggaa

SEQ ID NO: 9698 - RNA, 22 nt, synthetic construct
  source 1..22: mol_type = other RNA
aagaggctagccggaagcgctc

SEQ ID NO: 9699 - RNA, 22 nt, synthetic construct
  source 1..22: mol_type = other RNA
aagaggctgtgcttcggcgctc

SEQ ID NO: 9700 - RNA, 22 nt, synthetic construct
  source 1..22: mol_type = other RNA
aagaggggggccggcactactg

SEQ ID NO: 9701 - RNA, 22 nt, synthetic construct
  source 1..22: mol_type = other RNA
aagatattctcacaagatcgtt

SEQ ID NO: 9702 - RNA, 22 nt, synthetic construct
  source 1..22: mol_type = other RNA
aagatcgttctccacgcccaag

SEQ ID NO: 9703 - RNA, 22 nt, synthetic construct
  source 1..22: mol_type = other RNA
aagattacggaggggagatcgc

SEQ ID NO: 9704 - RNA, 22 nt, synthetic construct
  source 1..22: mol_type = other RNA
aagcaaggactctatagaatca

SEQ ID NO: 9705 - RNA, 22 nt, synthetic construct
  source 1..22: mol_type = other RNA
aagcacagcctcttctctaggc

SEQ ID NO: 9706 - RNA, 22 nt, synthetic construct
  source 1..22: mol_type = other RNA
aagcagccatctgaggtgggaa

SEQ ID NO: 9707 - RNA, 22 nt, synthetic construct
  source 1..22: mol_type = other RNA
aagcaggcggcgggtaaaccga

SEQ ID NO: 9708 - RNA, 22 nt, synthetic construct
  source 1..22: mol_type = other RNA
aagccaccagacggccccccta

SEQ ID NO: 9709 - RNA, 22 nt, synthetic construct
  source 1..22: mol_type = other RNA
aagccagaaaacgagagggaag

SEQ ID NO: 9710 - RNA, 22 nt, synthetic construct
  source 1..22: mol_type = other RNA
aagccccttctatgctaattga

SEQ ID NO: 9711 - RNA, 22 nt, synthetic construct
  source 1..22: mol_type = other RNA
aagcccgacctgctacaggcac

SEQ ID NO: 9712 - RNA, 22 nt, synthetic construct
  source 1..22: mol_type = other RNA
aagccgccggggccgcctagag

SEQ ID NO: 9713 - RNA, 22 nt, synthetic construct
  source 1..22: mol_type = other RNA
aagcgctcctccctctgcgaga

SEQ ID NO: 9714 - RNA, 22 nt, synthetic construct
  source 1..22: mol_type = other RNA
aagcggctgcgtactcccgacg

SEQ ID NO: 9715 - RNA, 22 nt, synthetic construct
  source 1..22: mol_type = other RNA
aagcgtcctgacccaggaaaaa

SEQ ID NO: 9716 - RNA, 22 nt, synthetic construct
  source 1..22: mol_type = other RNA
aagctcctgtcagttacgccgt

SEQ ID NO: 9717 - RNA, 22 nt, synthetic construct
  source 1..22: mol_type = other RNA
aagctcttaggaggatgctgcc

SEQ ID NO: 9718 - RNA, 22 nt, synthetic construct
  source 1..22: mol_type = other RNA
aagctgtgggaccgggcccttg

SEQ ID NO: 9719 - RNA, 22 nt, synthetic construct
  source 1..22: mol_type = other RNA
aaggaaggggagggtgggagga

SEQ ID NO: 9720 - RNA, 22 nt, synthetic construct
  source 1..22: mol_type = other RNA
aaggactctatagaatcaatta

SEQ ID NO: 9721 - RNA, 22 nt, synthetic construct
  source 1..22: mol_type = other RNA
aaggagagcgagcgcggggaga

SEQ ID NO: 9722 - RNA, 22 nt, synthetic construct
  source 1..22: mol_type = other RNA
aaggcaacccccgcaagccacc

SEQ ID NO: 9723 - RNA, 22 nt, synthetic construct
  source 1..22: mol_type = other RNA
aaggcaagtaaaacgacacaat

SEQ ID NO: 9724 - RNA, 22 nt, synthetic construct
  source 1..22: mol_type = other RNA
aaggcagaaaaatattcccttt

SEQ ID NO: 9725 - RNA, 22 nt, synthetic construct
  source 1..22: mol_type = other RNA
aaggcattaccttcgccacccc

SEQ ID NO: 9726 - RNA, 22 nt, synthetic construct
  source 1..22: mol_type = other RNA
aaggccgcgagaacgggggtag

SEQ ID NO: 9727 - RNA, 22 nt, synthetic construct
  source 1..22: mol_type = other RNA
aaggcggagcgagccaaaggcg

SEQ ID NO: 9728 - RNA, 22 nt, synthetic construct
  source 1..22: mol_type = other RNA
aaggcggcgaggggggtgagaa

SEQ ID NO: 9729 - RNA, 22 nt, synthetic construct
  source 1..22: mol_type = other RNA
aaggcgtccaggaagattacgg

SEQ ID NO: 9730 - RNA, 22 nt, synthetic construct
  source 1..22: mol_type = other RNA
aagggaaaggtaaacgtggagt

SEQ ID NO: 9731 - RNA, 22 nt, synthetic construct
  source 1..22: mol_type = other RNA
aagggaatatttttctgccttt

SEQ ID NO: 9732 - RNA, 22 nt, synthetic construct
  source 1..22: mol_type = other RNA
aagggagcggaaaatgctcgaa

SEQ ID NO: 9733 - RNA, 22 nt, synthetic construct
  source 1..22: mol_type = other RNA
aagggcccggtcccacagcttc

SEQ ID NO: 9734 - RNA, 22 nt, synthetic construct
  source 1..22: mol_type = other RNA
aagggcgagacaagcccgacct

SEQ ID NO: 9735 - RNA, 22 nt, synthetic construct
  source 1..22: mol_type = other RNA
aaggggagggtgggaggacgcc

SEQ ID NO: 9736 - RNA, 22 nt, synthetic construct
  source 1..22: mol_type = other RNA
aaggggctttcccaacagttta

SEQ ID NO: 9737 - RNA, 22 nt, synthetic construct
  source 1..22: mol_type = other RNA
aagggggagttgggtcgcctag

SEQ ID NO: 9738 - RNA, 22 nt, synthetic construct
  source 1..22: mol_type = other RNA
aagggggtgaagaggcgttggg

SEQ ID NO: 9739 - RNA, 22 nt, synthetic construct
  source 1..22: mol_type = other RNA
aaggggtggctggatgcaggcg

SEQ ID NO: 9740 - RNA, 22 nt, synthetic construct
  source 1..22: mol_type = other RNA
aagggtcacctcctccgtctcc

SEQ ID NO: 9741 - RNA, 22 nt, synthetic construct
  source 1..22: mol_type = other RNA
aagggtccgacagaaaagagac

SEQ ID NO: 9742 - RNA, 22 nt, synthetic construct
  source 1..22: mol_type = other RNA
aaggtaaacgtggagtaggcag

SEQ ID NO: 9743 - RNA, 22 nt, synthetic construct
  source 1..22: mol_type = other RNA
aaggtaagggtccgacagaaaa

SEQ ID NO: 9744 - RNA, 22 nt, synthetic construct
  source 1..22: mol_type = other RNA
aaggtaatgcctttgggaagca

SEQ ID NO: 9745 - RNA, 22 nt, synthetic construct
  source 1..22: mol_type = other RNA
aagtaaaacgacacaatctggc

SEQ ID NO: 9746 - RNA, 22 nt, synthetic construct
  source 1..22: mol_type = other RNA
aagtaggtaaatcgcatgagag

SEQ ID NO: 9747 - RNA, 22 nt, synthetic construct
  source 1..22: mol_type = other RNA
aagtatgcctgtgtatttcgag

SEQ ID NO: 9748 - RNA, 22 nt, synthetic construct
  source 1..22: mol_type = other RNA
aagtcgggaacataatgtttgt

SEQ ID NO: 9749 - RNA, 22 nt, synthetic construct
  source 1..22: mol_type = other RNA
aagtcgggaatgtgaagaggag

SEQ ID NO: 9750 - RNA, 22 nt, synthetic construct
  source 1..22: mol_type = other RNA
aagtctcggccggcagcccgcc

SEQ ID NO: 9751 - RNA, 22 nt, synthetic construct
  source 1..22: mol_type = other RNA
aagtgagacaagcaaggactct

SEQ ID NO: 9752 - RNA, 22 nt, synthetic construct
  source 1..22: mol_type = other RNA
aagtggcagcatcctcctaaga

SEQ ID NO: 9753 - RNA, 22 nt, synthetic construct
  source 1..22: mol_type = other RNA
aagttaaactgttgggaaagcc

SEQ ID NO: 9754 - RNA, 22 nt, synthetic construct
  source 1..22: mol_type = other RNA
aatacgccatttgtgttttcac

SEQ ID NO: 9755 - RNA, 22 nt, synthetic construct
  source 1..22: mol_type = other RNA
aatatcttcaaaggcagaaaaa

SEQ ID NO: 9756 - RNA, 22 nt, synthetic construct
  source 1..22: mol_type = other RNA
aatattccctttatgaattctc

SEQ ID NO: 9757 - RNA, 22 nt, synthetic construct
  source 1..22: mol_type = other RNA
aatatttttctgcctttgaaga

SEQ ID NO: 9758 - RNA, 22 nt, synthetic construct
  source 1..22: mol_type = other RNA
aatcaattagcatagaaggggc

SEQ ID NO: 9759 - RNA, 22 nt, synthetic construct
  source 1..22: mol_type = other RNA
aatcagcggaagccgccggggc

SEQ ID NO: 9760 - RNA, 22 nt, synthetic construct
  source 1..22: mol_type = other RNA
aatcaggtgtcgaagacaagca

SEQ ID NO: 9761 - RNA, 22 nt, synthetic construct
  source 1..22: mol_type = other RNA
aatccccgtgcggtcagtggcg

SEQ ID NO: 9762 - RNA, 22 nt, synthetic construct
  source 1..22: mol_type = other RNA
aatcgcatgagagggaaagtta

SEQ ID NO: 9763 - RNA, 22 nt, synthetic construct
  source 1..22: mol_type = other RNA
aatcggcgacaagaggctagcc

SEQ ID NO: 9764 - RNA, 22 nt, synthetic construct
  source 1..22: mol_type = other RNA
aatcggctctggcgcgggcgtc

SEQ ID NO: 9765 - RNA, 22 nt, synthetic construct
  source 1..22: mol_type = other RNA
aatctaggcgacccaactcccc

SEQ ID NO: 9766 - RNA, 22 nt, synthetic construct
  source 1..22: mol_type = other RNA
aatctggctcaactccaggctc

SEQ ID NO: 9767 - RNA, 22 nt, synthetic construct
  source 1..22: mol_type = other RNA
aatcttcctggacgccttccct

SEQ ID NO: 9768 - RNA, 22 nt, synthetic construct
  source 1..22: mol_type = other RNA
aatgcctttgggaagcagccat

SEQ ID NO: 9769 - RNA, 22 nt, synthetic construct
  source 1..22: mol_type = other RNA
aatgctcgaaaccggacggagc

SEQ ID NO: 9770 - RNA, 22 nt, synthetic construct
  source 1..22: mol_type = other RNA
aatggcccgtacccgtgaggtg

SEQ ID NO: 9771 - RNA, 22 nt, synthetic construct
  source 1..22: mol_type = other RNA
aatggcgcggcgggagggggcg

SEQ ID NO: 9772 - RNA, 22 nt, synthetic construct
  source 1..22: mol_type = other RNA
aatggcgtattctggttggagt

SEQ ID NO: 9773 - RNA, 22 nt, synthetic construct
  source 1..22: mol_type = other RNA
aatggctccgtccggtttcgag

SEQ ID NO: 9774 - RNA, 22 nt, synthetic construct
  source 1..22: mol_type = other RNA
aatggggtgttgcaacggtgtg

SEQ ID NO: 9775 - RNA, 22 nt, synthetic construct
  source 1..22: mol_type = other RNA
aatgggtgcggggcggtgggcg

SEQ ID NO: 9776 - RNA, 22 nt, synthetic construct
  source 1..22: mol_type = other RNA
aatgtgaagaggagtgtaggaa

SEQ ID NO: 9777 - RNA, 22 nt, synthetic construct
  source 1..22: mol_type = other RNA
aatgtgtagggttcgagcctgg

SEQ ID NO: 9778 - RNA, 22 nt, synthetic construct
  source 1..22: mol_type = other RNA
aatgtttgttacgttgggaggg

SEQ ID NO: 9779 - RNA, 22 nt, synthetic construct
  source 1..22: mol_type = other RNA
aattagcatagaaggggctttc

SEQ ID NO: 9780 - RNA, 22 nt, synthetic construct
  source 1..22: mol_type = other RNA
aattcataaagggaatattttt

SEQ ID NO: 9781 - RNA, 22 nt, synthetic construct
  source 1..22: mol_type = other RNA
aattctctttccctctgcgtgt

SEQ ID NO: 9782 - RNA, 22 nt, synthetic construct
  source 1..22: mol_type = other RNA
aattgattctatagagtccttg

SEQ ID NO: 9783 - RNA, 22 nt, synthetic construct
  source 1..22: mol_type = other RNA
acaaacattatgttcccgactt

SEQ ID NO: 9784 - RNA, 22 nt, synthetic construct
  source 1..22: mol_type = other RNA
acaaatggcgtattctggttgg

SEQ ID NO: 9785 - RNA, 22 nt, synthetic construct
  source 1..22: mol_type = other RNA
acaactctgatcgctctggggg

SEQ ID NO: 9786 - RNA, 22 nt, synthetic construct
  source 1..22: mol_type = other RNA
acaagaggctagccggaagcgc

SEQ ID NO: 9787 - RNA, 22 nt, synthetic construct
  source 1..22: mol_type = other RNA
acaagatcgttctccacgccca

SEQ ID NO: 9788 - RNA, 22 nt, synthetic construct
  source 1..22: mol_type = other RNA
acaagcaaggactctatagaat

SEQ ID NO: 9789 - RNA, 22 nt, synthetic construct
  source 1..22: mol_type = other RNA
acaagcaggcggcgggtaaacc

SEQ ID NO: 9790 - RNA, 22 nt, synthetic construct
  source 1..22: mol_type = other RNA
acaagcccgacctgctacaggc

SEQ ID NO: 9791 - RNA, 22 nt, synthetic construct
  source 1..22: mol_type = other RNA
acaaggccgcgagaacgggggt

SEQ ID NO: 9792 - RNA, 22 nt, synthetic construct
  source 1..22: mol_type = other RNA
acaaggtaagggtccgacagaa

SEQ ID NO: 9793 - RNA, 22 nt, synthetic construct
  source 1..22: mol_type = other RNA
acaatctggctcaactccaggc

SEQ ID NO: 9794 - RNA, 22 nt, synthetic construct
  source 1..22: mol_type = other RNA
acacaaatggcgtattctggtt

SEQ ID NO: 9795 - RNA, 22 nt, synthetic construct
  source 1..22: mol_type = other RNA
acacaatctggctcaactccag

SEQ ID NO: 9796 - RNA, 22 nt, synthetic construct
  source 1..22: mol_type = other RNA
acacaccgttgcaacaccccat

SEQ ID NO: 9797 - RNA, 22 nt, synthetic construct
  source 1..22: mol_type = other RNA
acacacggcgggaggagaaacg

SEQ ID NO: 9798 - RNA, 22 nt, synthetic construct
  source 1..22: mol_type = other RNA
acacagtagtgccggcccccct

SEQ ID NO: 9799 - RNA, 22 nt, synthetic construct
  source 1..22: mol_type = other RNA
acacattcaacgaggctatctc

SEQ ID NO: 9800 - RNA, 22 nt, synthetic construct
  source 1..22: mol_type = other RNA
acacccagcatctctacacccc

SEQ ID NO: 9801 - RNA, 22 nt, synthetic construct
  source 1..22: mol_type = other RNA
acaccccacctacctacccgcc

SEQ ID NO: 9802 - RNA, 22 nt, synthetic construct
  source 1..22: mol_type = other RNA
acaccccattttcccagggaga

SEQ ID NO: 9803 - RNA, 22 nt, synthetic construct
  source 1..22: mol_type = other RNA
acaccgttgcaacaccccattt

SEQ ID NO: 9804 - RNA, 22 nt, synthetic construct
  source 1..22: mol_type = other RNA
acacctgattggctgtcgaagc

SEQ ID NO: 9805 - RNA, 22 nt, synthetic construct
  source 1..22: mol_type = other RNA
acacgcagagggaaagagaatt

SEQ ID NO: 9806 - RNA, 22 nt, synthetic construct
  source 1..22: mol_type = other RNA
acacgccacggggagccagaga

SEQ ID NO: 9807 - RNA, 22 nt, synthetic construct
  source 1..22: mol_type = other RNA
acacgccccctcccgccgcgcc

SEQ ID NO: 9808 - RNA, 22 nt, synthetic construct
  source 1..22: mol_type = other RNA
acacgctgtggcacacgccacg

SEQ ID NO: 9809 - RNA, 22 nt, synthetic construct
  source 1..22: mol_type = other RNA
acacggcgggaggagaaacggc

SEQ ID NO: 9810 - RNA, 22 nt, synthetic construct
  source 1..22: mol_type = other RNA
acacgttctctggctccccgtg

SEQ ID NO: 9811 - RNA, 22 nt, synthetic construct
  source 1..22: mol_type = other RNA
acactcctcttcacattcccga

SEQ ID NO: 9812 - RNA, 22 nt, synthetic construct
  source 1..22: mol_type = other RNA
acactgcggcgctcggcctcgg

SEQ ID NO: 9813 - RNA, 22 nt, synthetic construct
  source 1..22: mol_type = other RNA
acactggggggatgggtggcta

SEQ ID NO: 9814 - RNA, 22 nt, synthetic construct
  source 1..22: mol_type = other RNA
acagaaaagagaccgaacctca

SEQ ID NO: 9815 - RNA, 22 nt, synthetic construct
  source 1..22: mol_type = other RNA
acagacaactctgatcgctctg

SEQ ID NO: 9816 - RNA, 22 nt, synthetic construct
  source 1..22: mol_type = other RNA
acagccaatcaggtgtcgaaga

SEQ ID NO: 9817 - RNA, 22 nt, synthetic construct
  source 1..22: mol_type = other RNA
acagcctcttctctaggcggcc

SEQ ID NO: 9818 - RNA, 22 nt, synthetic construct
  source 1..22: mol_type = other RNA
acagcgtgtctgagatagcctc

SEQ ID NO: 9819 - RNA, 22 nt, synthetic construct
  source 1..22: mol_type = other RNA
acagcttcgacagccaatcagg

SEQ ID NO: 9820 - RNA, 22 nt, synthetic construct
  source 1..22: mol_type = other RNA
acaggagctttactccaaccag

SEQ ID NO: 9821 - RNA, 22 nt, synthetic construct
  source 1..22: mol_type = other RNA
acaggcactcgtgggggtgggg

SEQ ID NO: 9822 - RNA, 22 nt, synthetic construct
  source 1..22: mol_type = other RNA
acagtagtgccggcccccctct

SEQ ID NO: 9823 - RNA, 22 nt, synthetic construct
  source 1..22: mol_type = other RNA
acagtttaactttccctctcat

SEQ ID NO: 9824 - RNA, 22 nt, synthetic construct
  source 1..22: mol_type = other RNA
acataatgtttgttacgttggg

SEQ ID NO: 9825 - RNA, 22 nt, synthetic construct
  source 1..22: mol_type = other RNA
acatgaaagggggagttgggtc

SEQ ID NO: 9826 - RNA, 22 nt, synthetic construct
  source 1..22: mol_type = other RNA
acatgagcgaaaccactgcgcg

SEQ ID NO: 9827 - RNA, 22 nt, synthetic construct
  source 1..22: mol_type = other RNA
acattatgttcccgacttccca

SEQ ID NO: 9828 - RNA, 22 nt, synthetic construct
  source 1..22: mol_type = other RNA
acattcaacgaggctatctcag

SEQ ID NO: 9829 - RNA, 22 nt, synthetic construct
  source 1..22: mol_type = other RNA
acattcccgacttacacgcaga

SEQ ID NO: 9830 - RNA, 22 nt, synthetic construct
  source 1..22: mol_type = other RNA
accacacgttctctggctcccc

SEQ ID NO: 9831 - RNA, 22 nt, synthetic construct
  source 1..22: mol_type = other RNA
accactgacgcccaagaagtga

SEQ ID NO: 9832 - RNA, 22 nt, synthetic construct
  source 1..22: mol_type = other RNA
accagaatacgccatttgtgtt

SEQ ID NO: 9833 - RNA, 22 nt, synthetic construct
  source 1..22: mol_type = other RNA
accagacggcccccctagccac

SEQ ID NO: 9834 - RNA, 22 nt, synthetic construct
  source 1..22: mol_type = other RNA
accagagttccgctcccctacc

SEQ ID NO: 9835 - RNA, 22 nt, synthetic construct
  source 1..22: mol_type = other RNA
accagccggaccgacccccgct

SEQ ID NO: 9836 - RNA, 22 nt, synthetic construct
  source 1..22: mol_type = other RNA
accagggctctttcctacactc

SEQ ID NO: 9837 - RNA, 22 nt, synthetic construct
  source 1..22: mol_type = other RNA
acccaactccccctttcatgtt

SEQ ID NO: 9838 - RNA, 22 nt, synthetic construct
  source 1..22: mol_type = other RNA
acccaaggagagcgagcgcggg

SEQ ID NO: 9839 - RNA, 22 nt, synthetic construct
  source 1..22: mol_type = other RNA
acccagcatctctacaccccac

SEQ ID NO: 9840 - RNA, 22 nt, synthetic construct
  source 1..22: mol_type = other RNA
acccaggaaaaacatgaaaggg

SEQ ID NO: 9841 - RNA, 22 nt, synthetic construct
  source 1..22: mol_type = other RNA
acccagggggcaacgcgagagt

SEQ ID NO: 9842 - RNA, 22 nt, synthetic construct
  source 1..22: mol_type = other RNA
acccatccccccagtgtaccgc

SEQ ID NO: 9843 - RNA, 22 nt, synthetic construct
  source 1..22: mol_type = other RNA
acccattggcccactcgccgcc

SEQ ID NO: 9844 - RNA, 22 nt, synthetic construct
  source 1..22: mol_type = other RNA
accccacctacctacccgcccc

SEQ ID NO: 9845 - RNA, 22 nt, synthetic construct
  source 1..22: mol_type = other RNA
accccattttcccagggagaga

SEQ ID NO: 9846 - RNA, 22 nt, synthetic construct
  source 1..22: mol_type = other RNA
acccccaccacacgttctctgg

SEQ ID NO: 9847 - RNA, 22 nt, synthetic construct
  source 1..22: mol_type = other RNA
acccccacctcacgggtacggg

SEQ ID NO: 9848 - RNA, 22 nt, synthetic construct
  source 1..22: mol_type = other RNA
acccccacgagtgcctgtagca

SEQ ID NO: 9849 - RNA, 22 nt, synthetic construct
  source 1..22: mol_type = other RNA
acccccctcgccgccttgcaca

SEQ ID NO: 9850 - RNA, 22 nt, synthetic construct
  source 1..22: mol_type = other RNA
acccccgcaagccaccagacgg

SEQ ID NO: 9851 - RNA, 22 nt, synthetic construct
  source 1..22: mol_type = other RNA
acccccgcgccccgcgcagtgg

SEQ ID NO: 9852 - RNA, 22 nt, synthetic construct
  source 1..22: mol_type = other RNA
acccccgctcctcccccacccc

SEQ ID NO: 9853 - RNA, 22 nt, synthetic construct
  source 1..22: mol_type = other RNA
acccccgttctcgcggccttgt

SEQ ID NO: 9854 - RNA, 22 nt, synthetic construct
  source 1..22: mol_type = other RNA
accccctttcctgggaactgcc

SEQ ID NO: 9855 - RNA, 22 nt, synthetic construct
  source 1..22: mol_type = other RNA
acccctttccctcccaacgtaa

SEQ ID NO: 9856 - RNA, 22 nt, synthetic construct
  source 1..22: mol_type = other RNA
acccgccccacccagggggcaa

SEQ ID NO: 9857 - RNA, 22 nt, synthetic construct
  source 1..22: mol_type = other RNA
acccgccgcctgcttgtcttcg

SEQ ID NO: 9858 - RNA, 22 nt, synthetic construct
  source 1..22: mol_type = other RNA
acccgtgaggtgggggtggggg

SEQ ID NO: 9859 - RNA, 22 nt, synthetic construct
  source 1..22: mol_type = other RNA
accctacacattcaacgaggct

SEQ ID NO: 9860 - RNA, 22 nt, synthetic construct
  source 1..22: mol_type = other RNA
accctccccttccttcggggga

SEQ ID NO: 9861 - RNA, 22 nt, synthetic construct
  source 1..22: mol_type = other RNA
acccttaccttgtcccaggcgc

SEQ ID NO: 9862 - RNA, 22 nt, synthetic construct
  source 1..22: mol_type = other RNA
acccttccctcccctggggccc

SEQ ID NO: 9863 - RNA, 22 nt, synthetic construct
  source 1..22: mol_type = other RNA
accgaacctcacgatcgggccc

SEQ ID NO: 9864 - RNA, 22 nt, synthetic construct
  source 1..22: mol_type = other RNA
accgacccccgctcctccccca

SEQ ID NO: 9865 - RNA, 22 nt, synthetic construct
  source 1..22: mol_type = other RNA
accgactcccccgaaggaaggg

SEQ ID NO: 9866 - RNA, 22 nt, synthetic construct
  source 1..22: mol_type = other RNA
accgcacctcccctcccaccag

SEQ ID NO: 9867 - RNA, 22 nt, synthetic construct
  source 1..22: mol_type = other RNA
accgcacggggattcccagcgc

SEQ ID NO: 9868 - RNA, 22 nt, synthetic construct
  source 1..22: mol_type = other RNA
accgccccgcacccattggccc

SEQ ID NO: 9869 - RNA, 22 nt, synthetic construct
  source 1..22: mol_type = other RNA
accgcctgaagggcgagacaag

SEQ ID NO: 9870 - RNA, 22 nt, synthetic construct
  source 1..22: mol_type = other RNA
accggacggagccattgctctc

SEQ ID NO: 9871 - RNA, 22 nt, synthetic construct
  source 1..22: mol_type = other RNA
accggagggggagggagaaggg

SEQ ID NO: 9872 - RNA, 22 nt, synthetic construct
  source 1..22: mol_type = other RNA
accgggcccttgctactggctc

SEQ ID NO: 9873 - RNA, 22 nt, synthetic construct
  source 1..22: mol_type = other RNA
accgtaccaacgcccgcctccc

SEQ ID NO: 9874 - RNA, 22 nt, synthetic construct
  source 1..22: mol_type = other RNA
accgttgcaacaccccattttc

SEQ ID NO: 9875 - RNA, 22 nt, synthetic construct
  source 1..22: mol_type = other RNA
acctacccgccccacccagggg

SEQ ID NO: 9876 - RNA, 22 nt, synthetic construct
  source 1..22: mol_type = other RNA
acctacctacccgccccaccca

SEQ ID NO: 9877 - RNA, 22 nt, synthetic construct
  source 1..22: mol_type = other RNA
acctacttgaaccagggctctt

SEQ ID NO: 9878 - RNA, 22 nt, synthetic construct
  source 1..22: mol_type = other RNA
acctagccgaggctctctgagg

SEQ ID NO: 9879 - RNA, 22 nt, synthetic construct
  source 1..22: mol_type = other RNA
acctcacgatcgggccccaggg

SEQ ID NO: 9880 - RNA, 22 nt, synthetic construct
  source 1..22: mol_type = other RNA
acctcacgggtacgggccattc

SEQ ID NO: 9881 - RNA, 22 nt, synthetic construct
  source 1..22: mol_type = other RNA
acctcagatggctgcttcccaa

SEQ ID NO: 9882 - RNA, 22 nt, synthetic construct
  source 1..22: mol_type = other RNA
acctcccctcccaccagagttc

SEQ ID NO: 9883 - RNA, 22 nt, synthetic construct
  source 1..22: mol_type = other RNA
acctcctccgtctccccgcgct

SEQ ID NO: 9884 - RNA, 22 nt, synthetic construct
  source 1..22: mol_type = other RNA
acctgattggctgtcgaagctg

SEQ ID NO: 9885 - RNA, 22 nt, synthetic construct
  source 1..22: mol_type = other RNA
acctgctacaggcactcgtggg

SEQ ID NO: 9886 - RNA, 22 nt, synthetic construct
  source 1..22: mol_type = other RNA
accttcgccacccccaccacac

SEQ ID NO: 9887 - RNA, 22 nt, synthetic construct
  source 1..22: mol_type = other RNA
accttgtcccaggcgctgccgg

SEQ ID NO: 9888 - RNA, 22 nt, synthetic construct
  source 1..22: mol_type = other RNA
acctttcccttgaggagaggcc

SEQ ID NO: 9889 - RNA, 22 nt, synthetic construct
  source 1..22: mol_type = other RNA
acgacacaatctggctcaactc

SEQ ID NO: 9890 - RNA, 22 nt, synthetic construct
  source 1..22: mol_type = other RNA
acgacccaaggagagcgagcgc

SEQ ID NO: 9891 - RNA, 22 nt, synthetic construct
  source 1..22: mol_type = other RNA
acgagagggaaggcgtccagga

SEQ ID NO: 9892 - RNA, 22 nt, synthetic construct
  source 1..22: mol_type = other RNA
acgaggctatctcagacacgct

SEQ ID NO: 9893 - RNA, 22 nt, synthetic construct
  source 1..22: mol_type = other RNA
acgagtgcctgtagcaggtcgg

SEQ ID NO: 9894 - RNA, 22 nt, synthetic construct
  source 1..22: mol_type = other RNA
acgatcgggccccaggggaggg

SEQ ID NO: 9895 - RNA, 22 nt, synthetic construct
  source 1..22: mol_type = other RNA
acgatcttgtgagaatatcttc

SEQ ID NO: 9896 - RNA, 22 nt, synthetic construct
  source 1..22: mol_type = other RNA
acgcagagggaaagagaattca

SEQ ID NO: 9897 - RNA, 22 nt, synthetic construct
  source 1..22: mol_type = other RNA
acgcagccccagtcccgccagt

SEQ ID NO: 9898 - RNA, 22 nt, synthetic construct
  source 1..22: mol_type = other RNA
acgcagccgcttagcgactctc

SEQ ID NO: 9899 - RNA, 22 nt, synthetic construct
  source 1..22: mol_type = other RNA
acgccacggggagccagagaac

SEQ ID NO: 9900 - RNA, 22 nt, synthetic construct
  source 1..22: mol_type = other RNA
acgccactgaccgcacggggat

SEQ ID NO: 9901 - RNA, 22 nt, synthetic construct
  source 1..22: mol_type = other RNA
acgccatttgtgttttcacaca

SEQ ID NO: 9902 - RNA, 22 nt, synthetic construct
  source 1..22: mol_type = other RNA
acgcccaagaagtgagacaagc

SEQ ID NO: 9903 - RNA, 22 nt, synthetic construct
  source 1..22: mol_type = other RNA
acgcccaaggcaagtaaaacga

SEQ ID NO: 9904 - RNA, 22 nt, synthetic construct
  source 1..22: mol_type = other RNA
acgccccctcccgccgcgccat

SEQ ID NO: 9905 - RNA, 22 nt, synthetic construct
  source 1..22: mol_type = other RNA
acgcccgcgccagagccgattt

SEQ ID NO: 9906 - RNA, 22 nt, synthetic construct
  source 1..22: mol_type = other RNA
acgccgtcgggagtacgcagcc

SEQ ID NO: 9907 - RNA, 22 nt, synthetic construct
  source 1..22: mol_type = other RNA
acgccgtggcgccgcgttgggc

SEQ ID NO: 9908 - RNA, 22 nt, synthetic construct
  source 1..22: mol_type = other RNA
acgcctcttcaccccctttcct

SEQ ID NO: 9909 - RNA, 22 nt, synthetic construct
  source 1..22: mol_type = other RNA
acgccttccctctcgttttctg

SEQ ID NO: 9910 - RNA, 22 nt, synthetic construct
  source 1..22: mol_type = other RNA
acgcgagagtcgctaagcggct

SEQ ID NO: 9911 - RNA, 22 nt, synthetic construct
  source 1..22: mol_type = other RNA
acgcggcgccacggcgtttcct

SEQ ID NO: 9912 - RNA, 22 nt, synthetic construct
  source 1..22: mol_type = other RNA
acgctgtggcacacgccacggg

SEQ ID NO: 9913 - RNA, 22 nt, synthetic construct
  source 1..22: mol_type = other RNA
acgcttcccctcccccaacgcc

SEQ ID NO: 9914 - RNA, 22 nt, synthetic construct
  source 1..22: mol_type = other RNA
acggagccattgctctcgcaga

SEQ ID NO: 9915 - RNA, 22 nt, synthetic construct
  source 1..22: mol_type = other RNA
acggaggaggtgacccttccct

SEQ ID NO: 9916 - RNA, 22 nt, synthetic construct
  source 1..22: mol_type = other RNA
acggaggggagatcgcggcccc

SEQ ID NO: 9917 - RNA, 22 nt, synthetic construct
  source 1..22: mol_type = other RNA
acggcactcccgggaggcggca

SEQ ID NO: 9918 - RNA, 22 nt, synthetic construct
  source 1..22: mol_type = other RNA
acggccaatcggcgacaagagg

SEQ ID NO: 9919 - RNA, 22 nt, synthetic construct
  source 1..22: mol_type = other RNA
acggcccccctagccacccatc

SEQ ID NO: 9920 - RNA, 22 nt, synthetic construct
  source 1..22: mol_type = other RNA
acggcgggaggagaaacggcca

SEQ ID NO: 9921 - RNA, 22 nt, synthetic construct
  source 1..22: mol_type = other RNA
acggcgtaactgacaggagctt

SEQ ID NO: 9922 - RNA, 22 nt, synthetic construct
  source 1..22: mol_type = other RNA
acggcgtttcctggccgggaat

SEQ ID NO: 9923 - RNA, 22 nt, synthetic construct
  source 1..22: mol_type = other RNA
acgggaaaggcaacccccgcaa

SEQ ID NO: 9924 - RNA, 22 nt, synthetic construct
  source 1..22: mol_type = other RNA
acgggccattcccggccaggaa

SEQ ID NO: 9925 - RNA, 22 nt, synthetic construct
  source 1..22: mol_type = other RNA
acggggagccagagaacgtgtg

SEQ ID NO: 9926 - RNA, 22 nt, synthetic construct
  source 1..22: mol_type = other RNA
acggggattcccagcgccggcg

SEQ ID NO: 9927 - RNA, 22 nt, synthetic construct
  source 1..22: mol_type = other RNA
acgggggtagggagtgggggat

SEQ ID NO: 9928 - RNA, 22 nt, synthetic construct
  source 1..22: mol_type = other RNA
acgggtacgggccattcccggc

SEQ ID NO: 9929 - RNA, 22 nt, synthetic construct
  source 1..22: mol_type = other RNA
acggtcctccccgaggccgagc

SEQ ID NO: 9930 - RNA, 22 nt, synthetic construct
  source 1..22: mol_type = other RNA
acggtgtgtgcaaggcggcgag

SEQ ID NO: 9931 - RNA, 22 nt, synthetic construct
  source 1..22: mol_type = other RNA
acgtaacaaacattatgttccc

SEQ ID NO: 9932 - RNA, 22 nt, synthetic construct
  source 1..22: mol_type = other RNA
acgtggagtaggcagttcccag

SEQ ID NO: 9933 - RNA, 22 nt, synthetic construct
  source 1..22: mol_type = other RNA
acgtggcaggaagcgcgcgctg

SEQ ID NO: 9934 - RNA, 22 nt, synthetic construct
  source 1..22: mol_type = other RNA
acgtgtggtgggggtggcgaag

SEQ ID NO: 9935 - RNA, 22 nt, synthetic construct
  source 1..22: mol_type = other RNA
acgttctctggctccccgtggc

SEQ ID NO: 9936 - RNA, 22 nt, synthetic construct
  source 1..22: mol_type = other RNA
acgttgcgcaggggcgcggggc

SEQ ID NO: 9937 - RNA, 22 nt, synthetic construct
  source 1..22: mol_type = other RNA
acgttgggagggaaaggggtgg

SEQ ID NO: 9938 - RNA, 22 nt, synthetic construct
  source 1..22: mol_type = other RNA
acgtttacctttcccttgagga

SEQ ID NO: 9939 - RNA, 22 nt, synthetic construct
  source 1..22: mol_type = other RNA
actactgtgttggcggactggc

SEQ ID NO: 9940 - RNA, 22 nt, synthetic construct
  source 1..22: mol_type = other RNA
actcacgcagccccagtcccgc

SEQ ID NO: 9941 - RNA, 22 nt, synthetic construct
  source 1..22: mol_type = other RNA
actcagcccgctgcccgagcgg

SEQ ID NO: 9942 - RNA, 22 nt, synthetic construct
  source 1..22: mol_type = other RNA
actccaaccagaatacgccatt

SEQ ID NO: 9943 - RNA, 22 nt, synthetic construct
  source 1..22: mol_type = other RNA
actccacgtttacctttccctt

SEQ ID NO: 9944 - RNA, 22 nt, synthetic construct
  source 1..22: mol_type = other RNA
actccaggctcgaaccctacac

SEQ ID NO: 9945 - RNA, 22 nt, synthetic construct
  source 1..22: mol_type = other RNA
actcccccgaaggaaggggagg

SEQ ID NO: 9946 - RNA, 22 nt, synthetic construct
  source 1..22: mol_type = other RNA
actccccctttcatgtttttcc

SEQ ID NO: 9947 - RNA, 22 nt, synthetic construct
  source 1..22: mol_type = other RNA
actcccgacggcgtaactgaca

SEQ ID NO: 9948 - RNA, 22 nt, synthetic construct
  source 1..22: mol_type = other RNA
actcccgggaggcggcaggact

SEQ ID NO: 9949 - RNA, 22 nt, synthetic construct
  source 1..22: mol_type = other RNA
actccctacccccgttctcgcg

SEQ ID NO: 9950 - RNA, 22 nt, synthetic construct
  source 1..22: mol_type = other RNA
actcctcttcacattcccgact

SEQ ID NO: 9951 - RNA, 22 nt, synthetic construct
  source 1..22: mol_type = other RNA
actcgagccagtagcaagggcc

SEQ ID NO: 9952 - RNA, 22 nt, synthetic construct
  source 1..22: mol_type = other RNA
actcgagtcctgccgcctcccg

SEQ ID NO: 9953 - RNA, 22 nt, synthetic construct
  source 1..22: mol_type = other RNA
actcgagttaggcccaacgcgg

SEQ ID NO: 9954 - RNA, 22 nt, synthetic construct
  source 1..22: mol_type = other RNA
actcgccgccaatcagcggaag

SEQ ID NO: 9955 - RNA, 22 nt, synthetic construct
  source 1..22: mol_type = other RNA
actcgtgggggtgggggaggag

SEQ ID NO: 9956 - RNA, 22 nt, synthetic construct
  source 1..22: mol_type = other RNA
actctatagaatcaattagcat

SEQ ID NO: 9957 - RNA, 22 nt, synthetic construct
  source 1..22: mol_type = other RNA
actctcgcgttgccccctgggt

SEQ ID NO: 9958 - RNA, 22 nt, synthetic construct
  source 1..22: mol_type = other RNA
actctgatcgctctgggggccg

SEQ ID NO: 9959 - RNA, 22 nt, synthetic construct
  source 1..22: mol_type = other RNA
actctggtgggaggggaggtgc

SEQ ID NO: 9960 - RNA, 22 nt, synthetic construct
  source 1..22: mol_type = other RNA
actgacaggagctttactccaa

SEQ ID NO: 9961 - RNA, 22 nt, synthetic construct
  source 1..22: mol_type = other RNA
actgaccctcccctcccgccgc

SEQ ID NO: 9962 - RNA, 22 nt, synthetic construct
  source 1..22: mol_type = other RNA
actgaccgcacggggattccca

SEQ ID NO: 9963 - RNA, 22 nt, synthetic construct
  source 1..22: mol_type = other RNA
actgacgcccaagaagtgagac

SEQ ID NO: 9964 - RNA, 22 nt, synthetic construct
  source 1..22: mol_type = other RNA
actgcagcatccatatccaaga

SEQ ID NO: 9965 - RNA, 22 nt, synthetic construct
  source 1..22: mol_type = other RNA
actgcctactccacgtttacct

SEQ ID NO: 9966 - RNA, 22 nt, synthetic construct
  source 1..22: mol_type = other RNA
actgcggcgctcggcctcgggg

SEQ ID NO: 9967 - RNA, 22 nt, synthetic construct
  source 1..22: mol_type = other RNA
actggcgggactggggctgcgt

SEQ ID NO: 9968 - RNA, 22 nt, synthetic construct
  source 1..22: mol_type = other RNA
actggctcgagtctcacatgag

SEQ ID NO: 9969 - RNA, 22 nt, synthetic construct
  source 1..22: mol_type = other RNA
actggggctgcgtgagtctctg

SEQ ID NO: 9970 - RNA, 22 nt, synthetic construct
  source 1..22: mol_type = other RNA
actggggggatgggtggctagg

SEQ ID NO: 9971 - RNA, 22 nt, synthetic construct
  source 1..22: mol_type = other RNA
actgtgttggcggactggcggg

SEQ ID NO: 9972 - RNA, 22 nt, synthetic construct
  source 1..22: mol_type = other RNA
actgttgggaaagccccttcta

SEQ ID NO: 9973 - RNA, 22 nt, synthetic construct
  source 1..22: mol_type = other RNA
acttacacgcagagggaaagag

SEQ ID NO: 9974 - RNA, 22 nt, synthetic construct
  source 1..22: mol_type = other RNA
acttcccacgggaaaggcaacc

SEQ ID NO: 9975 - RNA, 22 nt, synthetic construct
  source 1..22: mol_type = other RNA
acttctcacccccctcgccgcc

SEQ ID NO: 9976 - RNA, 22 nt, synthetic construct
  source 1..22: mol_type = other RNA
acttctggatggcggcggccgc

SEQ ID NO: 9977 - RNA, 22 nt, synthetic construct
  source 1..22: mol_type = other RNA
acttcttgggcgtcagtggtct

SEQ ID NO: 9978 - RNA, 22 nt, synthetic construct
  source 1..22: mol_type = other RNA
acttgaaccagggctctttcct

SEQ ID NO: 9979 - RNA, 22 nt, synthetic construct
  source 1..22: mol_type = other RNA
acttgccttgggcgtggagaac

SEQ ID NO: 9980 - RNA, 22 nt, synthetic construct
  source 1..22: mol_type = other RNA
actttccctctcatgcgattta

SEQ ID NO: 9981 - RNA, 22 nt, synthetic construct
  source 1..22: mol_type = other RNA
agaaaacgagagggaaggcgtc

SEQ ID NO: 9982 - RNA, 22 nt, synthetic construct
  source 1..22: mol_type = other RNA
agaaaagagaccgaacctcacg

SEQ ID NO: 9983 - RNA, 22 nt, synthetic construct
  source 1..22: mol_type = other RNA
agaaacggccaatcggcgacaa

SEQ ID NO: 9984 - RNA, 22 nt, synthetic construct
  source 1..22: mol_type = other RNA
agaaagaccactgacgcccaag

SEQ ID NO: 9985 - RNA, 22 nt, synthetic construct
  source 1..22: mol_type = other RNA
agaaaggcggagcgagccaaag

SEQ ID NO: 9986 - RNA, 22 nt, synthetic construct
  source 1..22: mol_type = other RNA
agaacgatcttgtgagaatatc

SEQ ID NO: 9987 - RNA, 22 nt, synthetic construct
  source 1..22: mol_type = other RNA
agaacgggggtagggagtgggg

SEQ ID NO: 9988 - RNA, 22 nt, synthetic construct
  source 1..22: mol_type = other RNA
agaacgtgtggtgggggtggcg

SEQ ID NO: 9989 - RNA, 22 nt, synthetic construct
  source 1..22: mol_type = other RNA
agaagaggctgtgcttcggcgc

SEQ ID NO: 9990 - RNA, 22 nt, synthetic construct
  source 1..22: mol_type = other RNA
agaagggagcggaaaatgctcg

SEQ ID NO: 9991 - RNA, 22 nt, synthetic construct
  source 1..22: mol_type = other RNA
agaaggggctttcccaacagtt

SEQ ID NO: 9992 - RNA, 22 nt, synthetic construct
  source 1..22: mol_type = other RNA
agaagtctcggccggcagcccg

SEQ ID NO: 9993 - RNA, 22 nt, synthetic construct
  source 1..22: mol_type = other RNA
agaagtgagacaagcaaggact

SEQ ID NO: 9994 - RNA, 22 nt, synthetic construct
  source 1..22: mol_type = other RNA
agaagtggcagcatcctcctaa

SEQ ID NO: 9995 - RNA, 22 nt, synthetic construct
  source 1..22: mol_type = other RNA
agaatacgccatttgtgttttc

SEQ ID NO: 9996 - RNA, 22 nt, synthetic construct
  source 1..22: mol_type = other RNA
agaatatcttcaaaggcagaaa

SEQ ID NO: 9997 - RNA, 22 nt, synthetic construct
  source 1..22: mol_type = other RNA
agaatcaattagcatagaaggg

SEQ ID NO: 9998 - RNA, 22 nt, synthetic construct
  source 1..22: mol_type = other RNA
agaattcataaagggaatattt

SEQ ID NO: 9999 - RNA, 22 nt, synthetic construct
  source 1..22: mol_type = other RNA
agacaactctgatcgctctggg

SEQ ID NO: 10000 - RNA, 22 nt, synthetic construct
  source 1..22: mol_type = other RNA
agacaagcaaggactctataga

SEQ ID NO: 10001 - RNA, 22 nt, synthetic construct
  source 1..22: mol_type = other RNA
agacaagcaggcggcgggtaaa

SEQ ID NO: 10002 - RNA, 22 nt, synthetic construct
  source 1..22: mol_type = other RNA
agacaagcccgacctgctacag

SEQ ID NO: 10003 - RNA, 22 nt, synthetic construct
  source 1..22: mol_type = other RNA
agacacgctgtggcacacgcca

SEQ ID NO: 10004 - RNA, 22 nt, synthetic construct
  source 1..22: mol_type = other RNA
agacactgcggcgctcggcctc

SEQ ID NO: 10005 - RNA, 22 nt, synthetic construct
  source 1..22: mol_type = other RNA
agaccactgacgcccaagaagt

SEQ ID NO: 10006 - RNA, 22 nt, synthetic construct
  source 1..22: mol_type = other RNA
agaccgaacctcacgatcgggc

SEQ ID NO: 10007 - RNA, 22 nt, synthetic construct
  source 1..22: mol_type = other RNA
agacggaggaggtgacccttcc

SEQ ID NO: 10008 - RNA, 22 nt, synthetic construct
  source 1..22: mol_type = other RNA
agacggcccccctagccaccca

SEQ ID NO: 10009 - RNA, 22 nt, synthetic construct
  source 1..22: mol_type = other RNA
agactcacgcagccccagtccc

SEQ ID NO: 10010 - RNA, 22 nt, synthetic construct
  source 1..22: mol_type = other RNA
agactcgagccagtagcaaggg

SEQ ID NO: 10011 - RNA, 22 nt, synthetic construct
  source 1..22: mol_type = other RNA
agacttctggatggcggcggcc

SEQ ID NO: 10012 - RNA, 22 nt, synthetic construct
  source 1..22: mol_type = other RNA
agagaaagaccactgacgccca

SEQ ID NO: 10013 - RNA, 22 nt, synthetic construct
  source 1..22: mol_type = other RNA
agagaacgtgtggtgggggtgg

SEQ ID NO: 10014 - RNA, 22 nt, synthetic construct
  source 1..22: mol_type = other RNA
agagaagaggctgtgcttcggc

SEQ ID NO: 10015 - RNA, 22 nt, synthetic construct
  source 1..22: mol_type = other RNA
agagaattcataaagggaatat

SEQ ID NO: 10016 - RNA, 22 nt, synthetic construct
  source 1..22: mol_type = other RNA
agagaccgaacctcacgatcgg

SEQ ID NO: 10017 - RNA, 22 nt, synthetic construct
  source 1..22: mol_type = other RNA
agagactcacgcagccccagtc

SEQ ID NO: 10018 - RNA, 22 nt, synthetic construct
  source 1..22: mol_type = other RNA
agagagatccccctctaatcta

SEQ ID NO: 10019 - RNA, 22 nt, synthetic construct
  source 1..22: mol_type = other RNA
agagagcctcggctaggtaggg

SEQ ID NO: 10020 - RNA, 22 nt, synthetic construct
  source 1..22: mol_type = other RNA
agagatccccctctaatctagg

SEQ ID NO: 10021 - RNA, 22 nt, synthetic construct
  source 1..22: mol_type = other RNA
agagatgctgggtgtgcgggcg

SEQ ID NO: 10022 - RNA, 22 nt, synthetic construct
  source 1..22: mol_type = other RNA
agagcaatggctccgtccggtt

SEQ ID NO: 10023 - RNA, 22 nt, synthetic construct
  source 1..22: mol_type = other RNA
agagccctggttcaagtaggta

SEQ ID NO: 10024 - RNA, 22 nt, synthetic construct
  source 1..22: mol_type = other RNA
agagccgatttcactgaccctc

SEQ ID NO: 10025 - RNA, 22 nt, synthetic construct
  source 1..22: mol_type = other RNA
agagcctcggctaggtagggga

SEQ ID NO: 10026 - RNA, 22 nt, synthetic construct
  source 1..22: mol_type = other RNA
agagcgagcgcggggagacgga

SEQ ID NO: 10027 - RNA, 22 nt, synthetic construct
  source 1..22: mol_type = other RNA
agagcgatcagagttgtctgtc

SEQ ID NO: 10028 - RNA, 22 nt, synthetic construct
  source 1..22: mol_type = other RNA
agagcttggggagggccaggcc

SEQ ID NO: 10029 - RNA, 22 nt, synthetic construct
  source 1..22: mol_type = other RNA
agaggagtgtaggaaagagccc

SEQ ID NO: 10030 - RNA, 22 nt, synthetic construct
  source 1..22: mol_type = other RNA
agaggccaatggcgcggcggga

SEQ ID NO: 10031 - RNA, 22 nt, synthetic construct
  source 1..22: mol_type = other RNA
agaggcctctcctcaagggaaa

SEQ ID NO: 10032 - RNA, 22 nt, synthetic construct
  source 1..22: mol_type = other RNA
agaggcctcttgctgccctccg

SEQ ID NO: 10033 - RNA, 22 nt, synthetic construct
  source 1..22: mol_type = other RNA
agaggcgttgggggaggggaag

SEQ ID NO: 10034 - RNA, 22 nt, synthetic construct
  source 1..22: mol_type = other RNA
agaggctagccggaagcgctcc

SEQ ID NO: 10035 - RNA, 22 nt, synthetic construct
  source 1..22: mol_type = other RNA
agaggctgtgcttcggcgctcc

SEQ ID NO: 10036 - RNA, 22 nt, synthetic construct
  source 1..22: mol_type = other RNA
agagggaaagagaattcataaa

SEQ ID NO: 10037 - RNA, 22 nt, synthetic construct
  source 1..22: mol_type = other RNA
agagggaaagttaaactgttgg

SEQ ID NO: 10038 - RNA, 22 nt, synthetic construct
  source 1..22: mol_type = other RNA
agagggaaggcgtccaggaaga

SEQ ID NO: 10039 - RNA, 22 nt, synthetic construct
  source 1..22: mol_type = other RNA
agagggaggagcgcttccggct

SEQ ID NO: 10040 - RNA, 22 nt, synthetic construct
  source 1..22: mol_type = other RNA
agagggggatctctctccctgg

SEQ ID NO: 10041 - RNA, 22 nt, synthetic construct
  source 1..22: mol_type = other RNA
agaggggggccggcactactgt

SEQ ID NO: 10042 - RNA, 22 nt, synthetic construct
  source 1..22: mol_type = other RNA
agagtccttgcttgtctcactt

SEQ ID NO: 10043 - RNA, 22 nt, synthetic construct
  source 1..22: mol_type = other RNA
agagtcgctaagcggctgcgta

SEQ ID NO: 10044 - RNA, 22 nt, synthetic construct
  source 1..22: mol_type = other RNA
agagttccgctcccctacctag

SEQ ID NO: 10045 - RNA, 22 nt, synthetic construct
  source 1..22: mol_type = other RNA
agagttgtctgtcacaaggccg

SEQ ID NO: 10046 - RNA, 22 nt, synthetic construct
  source 1..22: mol_type = other RNA
agatagcctcgttgaatgtgta

SEQ ID NO: 10047 - RNA, 22 nt, synthetic construct
  source 1..22: mol_type = other RNA
agatattctcacaagatcgttc

SEQ ID NO: 10048 - RNA, 22 nt, synthetic construct
  source 1..22: mol_type = other RNA
agatccccctctaatctaggcg

SEQ ID NO: 10049 - RNA, 22 nt, synthetic construct
  source 1..22: mol_type = other RNA
agatcgcggcccccagagcgat

SEQ ID NO: 10050 - RNA, 22 nt, synthetic construct
  source 1..22: mol_type = other RNA
agatcgttctccacgcccaagg

SEQ ID NO: 10051 - RNA, 22 nt, synthetic construct
  source 1..22: mol_type = other RNA
agatgctgggtgtgcgggcgcg

SEQ ID NO: 10052 - RNA, 22 nt, synthetic construct
  source 1..22: mol_type = other RNA
agatggctgcttcccaaaggca

SEQ ID NO: 10053 - RNA, 22 nt, synthetic construct
  source 1..22: mol_type = other RNA
agattacggaggggagatcgcg

SEQ ID NO: 10054 - RNA, 22 nt, synthetic construct
  source 1..22: mol_type = other RNA
agattagagggggatctctctc

SEQ ID NO: 10055 - RNA, 22 nt, synthetic construct
  source 1..22: mol_type = other RNA
agattgtgtcgttttacttgcc

SEQ ID NO: 10056 - RNA, 22 nt, synthetic construct
  source 1..22: mol_type = other RNA
agcaagaggcctctcctcaagg

SEQ ID NO: 10057 - RNA, 22 nt, synthetic construct
  source 1..22: mol_type = other RNA
agcaaggactctatagaatcaa

SEQ ID NO: 10058 - RNA, 22 nt, synthetic construct
  source 1..22: mol_type = other RNA
agcaagggcccggtcccacagc

SEQ ID NO: 10059 - RNA, 22 nt, synthetic construct
  source 1..22: mol_type = other RNA
agcaatggctccgtccggtttc

SEQ ID NO: 10060 - RNA, 22 nt, synthetic construct
  source 1..22: mol_type = other RNA
agcacagcctcttctctaggcg

SEQ ID NO: 10061 - RNA, 22 nt, synthetic construct
  source 1..22: mol_type = other RNA
agcagccatctgaggtgggaag

SEQ ID NO: 10062 - RNA, 22 nt, synthetic construct
  source 1..22: mol_type = other RNA
agcaggcggcgggtaaaccgac

SEQ ID NO: 10063 - RNA, 22 nt, synthetic construct
  source 1..22: mol_type = other RNA
agcaggtcgggcttgtctcgcc

SEQ ID NO: 10064 - RNA, 22 nt, synthetic construct
  source 1..22: mol_type = other RNA
agcatagaaggggctttcccaa

SEQ ID NO: 10065 - RNA, 22 nt, synthetic construct
  source 1..22: mol_type = other RNA
agcatccatatccaagagaaag

SEQ ID NO: 10066 - RNA, 22 nt, synthetic construct
  source 1..22: mol_type = other RNA
agcatcctcctaagagcttggg

SEQ ID NO: 10067 - RNA, 22 nt, synthetic construct
  source 1..22: mol_type = other RNA
agcatctctacaccccacctac

SEQ ID NO: 10068 - RNA, 22 nt, synthetic construct
  source 1..22: mol_type = other RNA
agcattttccgctcccttctcc

SEQ ID NO: 10069 - RNA, 22 nt, synthetic construct
  source 1..22: mol_type = other RNA
agccaatcaggtgtcgaagaca

SEQ ID NO: 10070 - RNA, 22 nt, synthetic construct
  source 1..22: mol_type = other RNA
agccaccagacggcccccctag

SEQ ID NO: 10071 - RNA, 22 nt, synthetic construct
  source 1..22: mol_type = other RNA
agccacccatccccccagtgta

SEQ ID NO: 10072 - RNA, 22 nt, synthetic construct
  source 1..22: mol_type = other RNA
agccacccctttccctcccaac

SEQ ID NO: 10073 - RNA, 22 nt, synthetic construct
  source 1..22: mol_type = other RNA
agccagaaaacgagagggaagg

SEQ ID NO: 10074 - RNA, 22 nt, synthetic construct
  source 1..22: mol_type = other RNA
agccagagaacgtgtggtgggg

SEQ ID NO: 10075 - RNA, 22 nt, synthetic construct
  source 1..22: mol_type = other RNA
agccagattgtgtcgttttact

SEQ ID NO: 10076 - RNA, 22 nt, synthetic construct
  source 1..22: mol_type = other RNA
agccagtagcaagggcccggtc

SEQ ID NO: 10077 - RNA, 22 nt, synthetic construct
  source 1..22: mol_type = other RNA
agccatctgaggtgggaagcca

SEQ ID NO: 10078 - RNA, 22 nt, synthetic construct
  source 1..22: mol_type = other RNA
agccattgctctcgcagaggga

SEQ ID NO: 10079 - RNA, 22 nt, synthetic construct
  source 1..22: mol_type = other RNA
agccccagtcccgccagtccgc

SEQ ID NO: 10080 - RNA, 22 nt, synthetic construct
  source 1..22: mol_type = other RNA
agccccttctatgctaattgat

SEQ ID NO: 10081 - RNA, 22 nt, synthetic construct
  source 1..22: mol_type = other RNA
agcccgacctgctacaggcact

SEQ ID NO: 10082 - RNA, 22 nt, synthetic construct
  source 1..22: mol_type = other RNA
agcccgctgcccgagcggaaac

SEQ ID NO: 10083 - RNA, 22 nt, synthetic construct
  source 1..22: mol_type = other RNA
agccctggttcaagtaggtaaa

SEQ ID NO: 10084 - RNA, 22 nt, synthetic construct
  source 1..22: mol_type = other RNA
agccgaggctctctgaggagcc

SEQ ID NO: 10085 - RNA, 22 nt, synthetic construct
  source 1..22: mol_type = other RNA
agccgatttcactgaccctccc

SEQ ID NO: 10086 - RNA, 22 nt, synthetic construct
  source 1..22: mol_type = other RNA
agccgccggggccgcctagaga

SEQ ID NO: 10087 - RNA, 22 nt, synthetic construct
  source 1..22: mol_type = other RNA
agccgcggccgccgccatccag

SEQ ID NO: 10088 - RNA, 22 nt, synthetic construct
  source 1..22: mol_type = other RNA
agccgcttagcgactctcgcgt

SEQ ID NO: 10089 - RNA, 22 nt, synthetic construct
  source 1..22: mol_type = other RNA
agccggaagcgctcctccctct

SEQ ID NO: 10090 - RNA, 22 nt, synthetic construct
  source 1..22: mol_type = other RNA
agccggaccgacccccgctcct

SEQ ID NO: 10091 - RNA, 22 nt, synthetic construct
  source 1..22: mol_type = other RNA
agccggagcgccgaagcacagc

SEQ ID NO: 10092 - RNA, 22 nt, synthetic construct
  source 1..22: mol_type = other RNA
agcctcggctaggtaggggagc

SEQ ID NO: 10093 - RNA, 22 nt, synthetic construct
  source 1..22: mol_type = other RNA
agcctcgttgaatgtgtagggt

SEQ ID NO: 10094 - RNA, 22 nt, synthetic construct
  source 1..22: mol_type = other RNA
agcctcttctctaggcggcccc

SEQ ID NO: 10095 - RNA, 22 nt, synthetic construct
  source 1..22: mol_type = other RNA
agcctcttgtcgccgattggcc

SEQ ID NO: 10096 - RNA, 22 nt, synthetic construct
  source 1..22: mol_type = other RNA
agcctggagttgagccagattg

SEQ ID NO: 10097 - RNA, 22 nt, synthetic construct
  source 1..22: mol_type = other RNA
agcgaaaccactgcgcggggcg

SEQ ID NO: 10098 - RNA, 22 nt, synthetic construct
  source 1..22: mol_type = other RNA
agcgactctcgcgttgccccct

SEQ ID NO: 10099 - RNA, 22 nt, synthetic construct
  source 1..22: mol_type = other RNA
agcgagcgcggggagacggagg

SEQ ID NO: 10100 - RNA, 22 nt, synthetic construct
  source 1..22: mol_type = other RNA
agcgatcagagttgtctgtcac

SEQ ID NO: 10101 - RNA, 22 nt, synthetic construct
  source 1..22: mol_type = other RNA
agcgccgaagcacagcctcttc

SEQ ID NO: 10102 - RNA, 22 nt, synthetic construct
  source 1..22: mol_type = other RNA
agcgccgcagtgtctggccccg

SEQ ID NO: 10103 - RNA, 22 nt, synthetic construct
  source 1..22: mol_type = other RNA
agcgcctgggacaaggtaaggg

SEQ ID NO: 10104 - RNA, 22 nt, synthetic construct
  source 1..22: mol_type = other RNA
agcgcgcgcttcctgccacgtt

SEQ ID NO: 10105 - RNA, 22 nt, synthetic construct
  source 1..22: mol_type = other RNA
agcgcggggagacggaggaggt

SEQ ID NO: 10106 - RNA, 22 nt, synthetic construct
  source 1..22: mol_type = other RNA
agcgctcctccctctgcgagag

SEQ ID NO: 10107 - RNA, 22 nt, synthetic construct
  source 1..22: mol_type = other RNA
agcgcttccggctagcctcttg

SEQ ID NO: 10108 - RNA, 22 nt, synthetic construct
  source 1..22: mol_type = other RNA
agcggaaaatgctcgaaaccgg

SEQ ID NO: 10109 - RNA, 22 nt, synthetic construct
  source 1..22: mol_type = other RNA
agcggaaacgccactgaccgca

SEQ ID NO: 10110 - RNA, 22 nt, synthetic construct
  source 1..22: mol_type = other RNA
agcggaactctggtgggagggg

SEQ ID NO: 10111 - RNA, 22 nt, synthetic construct
  source 1..22: mol_type = other RNA
agcggaagccgccggggccgcc

SEQ ID NO: 10112 - RNA, 22 nt, synthetic construct
  source 1..22: mol_type = other RNA
agcggagggcagcaagaggcct

SEQ ID NO: 10113 - RNA, 22 nt, synthetic construct
  source 1..22: mol_type = other RNA
agcggctgcgtactcccgacgg

SEQ ID NO: 10114 - RNA, 22 nt, synthetic construct
  source 1..22: mol_type = other RNA
agcgggctgagtgagctgccgc

SEQ ID NO: 10115 - RNA, 22 nt, synthetic construct
  source 1..22: mol_type = other RNA
agcgtcctgacccaggaaaaac

SEQ ID NO: 10116 - RNA, 22 nt, synthetic construct
  source 1..22: mol_type = other RNA
agcgtgtctgagatagcctcgt

SEQ ID NO: 10117 - RNA, 22 nt, synthetic construct
  source 1..22: mol_type = other RNA
agctcactcagcccgctgcccg

SEQ ID NO: 10118 - RNA, 22 nt, synthetic construct
  source 1..22: mol_type = other RNA
agctcctgtcagttacgccgtc

SEQ ID NO: 10119 - RNA, 22 nt, synthetic construct
  source 1..22: mol_type = other RNA
agctcttaggaggatgctgcca

SEQ ID NO: 10120 - RNA, 22 nt, synthetic construct
  source 1..22: mol_type = other RNA
agctgtgggaccgggcccttgc

SEQ ID NO: 10121 - RNA, 22 nt, synthetic construct
  source 1..22: mol_type = other RNA
agcttcgacagccaatcaggtg

SEQ ID NO: 10122 - RNA, 22 nt, synthetic construct
  source 1..22: mol_type = other RNA
agcttggggagggccaggccca

SEQ ID NO: 10123 - RNA, 22 nt, synthetic construct
  source 1..22: mol_type = other RNA
agctttactccaaccagaatac

SEQ ID NO: 10124 - RNA, 22 nt, synthetic construct
  source 1..22: mol_type = other RNA
aggaaaaacatgaaagggggag

SEQ ID NO: 10125 - RNA, 22 nt, synthetic construct
  source 1..22: mol_type = other RNA
aggaaacgccgtggcgccgcgt

SEQ ID NO: 10126 - RNA, 22 nt, synthetic construct
  source 1..22: mol_type = other RNA
aggaaagagccctggttcaagt

SEQ ID NO: 10127 - RNA, 22 nt, synthetic construct
  source 1..22: mol_type = other RNA
aggaaagggggtgaagaggcgt

SEQ ID NO: 10128 - RNA, 22 nt, synthetic construct
  source 1..22: mol_type = other RNA
aggaagattacggaggggagat

SEQ ID NO: 10129 - RNA, 22 nt, synthetic construct
  source 1..22: mol_type = other RNA
aggaaggggagggtgggaggac

SEQ ID NO: 10130 - RNA, 22 nt, synthetic construct
  source 1..22: mol_type = other RNA
aggaccgtaccaacgcccgcct

SEQ ID NO: 10131 - RNA, 22 nt, synthetic construct
  source 1..22: mol_type = other RNA
aggacgcccgcgccagagccga

SEQ ID NO: 10132 - RNA, 22 nt, synthetic construct
  source 1..22: mol_type = other RNA
aggacgcttcccctcccccaac

SEQ ID NO: 10133 - RNA, 22 nt, synthetic construct
  source 1..22: mol_type = other RNA
aggactcgagttaggcccaacg

SEQ ID NO: 10134 - RNA, 22 nt, synthetic construct
  source 1..22: mol_type = other RNA
aggactctatagaatcaattag

SEQ ID NO: 10135 - RNA, 22 nt, synthetic construct
  source 1..22: mol_type = other RNA
aggagaaacggccaatcggcga

SEQ ID NO: 10136 - RNA, 22 nt, synthetic construct
  source 1..22: mol_type = other RNA
aggagagcgagcgcggggagac

SEQ ID NO: 10137 - RNA, 22 nt, synthetic construct
  source 1..22: mol_type = other RNA
aggagaggcctcttgctgccct

SEQ ID NO: 10138 - RNA, 22 nt, synthetic construct
  source 1..22: mol_type = other RNA
aggagccggagcgccgaagcac

SEQ ID NO: 10139 - RNA, 22 nt, synthetic construct
  source 1..22: mol_type = other RNA
aggagcgcttccggctagcctc

SEQ ID NO: 10140 - RNA, 22 nt, synthetic construct
  source 1..22: mol_type = other RNA
aggagctttactccaaccagaa

SEQ ID NO: 10141 - RNA, 22 nt, synthetic construct
  source 1..22: mol_type = other RNA
aggaggatgctgccacttctca

SEQ ID NO: 10142 - RNA, 22 nt, synthetic construct
  source 1..22: mol_type = other RNA
aggaggccggccgcgcccgcac

SEQ ID NO: 10143 - RNA, 22 nt, synthetic construct
  source 1..22: mol_type = other RNA
aggaggtgacccttccctcccc

SEQ ID NO: 10144 - RNA, 22 nt, synthetic construct
  source 1..22: mol_type = other RNA
aggagtgtaggaaagagccctg

SEQ ID NO: 10145 - RNA, 22 nt, synthetic construct
  source 1..22: mol_type = other RNA
aggatgctgccacttctcaccc

SEQ ID NO: 10146 - RNA, 22 nt, synthetic construct
  source 1..22: mol_type = other RNA
aggcaacccccgcaagccacca

SEQ ID NO: 10147 - RNA, 22 nt, synthetic construct
  source 1..22: mol_type = other RNA
aggcaagtaaaacgacacaatc

SEQ ID NO: 10148 - RNA, 22 nt, synthetic construct
  source 1..22: mol_type = other RNA
aggcactcgtgggggtggggga

SEQ ID NO: 10149 - RNA, 22 nt, synthetic construct
  source 1..22: mol_type = other RNA
aggcagaaaaatattcccttta

SEQ ID NO: 10150 - RNA, 22 nt, synthetic construct
  source 1..22: mol_type = other RNA
aggcagttcccaggaaaggggg

SEQ ID NO: 10151 - RNA, 22 nt, synthetic construct
  source 1..22: mol_type = other RNA
aggcattaccttcgccaccccc

SEQ ID NO: 10152 - RNA, 22 nt, synthetic construct
  source 1..22: mol_type = other RNA
aggccaatggcgcggcgggagg

SEQ ID NO: 10153 - RNA, 22 nt, synthetic construct
  source 1..22: mol_type = other RNA
aggcccaacgcggcgccacggc

SEQ ID NO: 10154 - RNA, 22 nt, synthetic construct
  source 1..22: mol_type = other RNA
aggcccacgacccaaggagagc

SEQ ID NO: 10155 - RNA, 22 nt, synthetic construct
  source 1..22: mol_type = other RNA
aggccccggcagcgcctgggac

SEQ ID NO: 10156 - RNA, 22 nt, synthetic construct
  source 1..22: mol_type = other RNA
aggcccgccctgcggcaaccgg

SEQ ID NO: 10157 - RNA, 22 nt, synthetic construct
  source 1..22: mol_type = other RNA
aggccgagcgccgcagtgtctg

SEQ ID NO: 10158 - RNA, 22 nt, synthetic construct
  source 1..22: mol_type = other RNA
aggccgcgagaacgggggtagg

SEQ ID NO: 10159 - RNA, 22 nt, synthetic construct
  source 1..22: mol_type = other RNA
aggccggccgcgcccgcacacc

SEQ ID NO: 10160 - RNA, 22 nt, synthetic construct
  source 1..22: mol_type = other RNA
aggcctctcctcaagggaaagg

SEQ ID NO: 10161 - RNA, 22 nt, synthetic construct
  source 1..22: mol_type = other RNA
aggcctcttgctgccctccgct

SEQ ID NO: 10162 - RNA, 22 nt, synthetic construct
  source 1..22: mol_type = other RNA
aggcgacccaactccccctttc

SEQ ID NO: 10163 - RNA, 22 nt, synthetic construct
  source 1..22: mol_type = other RNA
aggcggagcgagccaaaggcgg

SEQ ID NO: 10164 - RNA, 22 nt, synthetic construct
  source 1..22: mol_type = other RNA
aggcggcaggactcgagttagg

SEQ ID NO: 10165 - RNA, 22 nt, synthetic construct
  source 1..22: mol_type = other RNA
aggcggccccggcggcttccgc

SEQ ID NO: 10166 - RNA, 22 nt, synthetic construct
  source 1..22: mol_type = other RNA
aggcggcgaggggggtgagaag

SEQ ID NO: 10167 - RNA, 22 nt, synthetic construct
  source 1..22: mol_type = other RNA
aggcggcgggtaaaccgactcc

SEQ ID NO: 10168 - RNA, 22 nt, synthetic construct
  source 1..22: mol_type = other RNA
aggcgggagggaggcccgccct

SEQ ID NO: 10169 - RNA, 22 nt, synthetic construct
  source 1..22: mol_type = other RNA
aggcgggcgttggtacggtcct

SEQ ID NO: 10170 - RNA, 22 nt, synthetic construct
  source 1..22: mol_type = other RNA
aggcgggggcgggctgccggcc

SEQ ID NO: 10171 - RNA, 22 nt, synthetic construct
  source 1..22: mol_type = other RNA
aggcgtccaggaagattacgga

SEQ ID NO: 10172 - RNA, 22 nt, synthetic construct
  source 1..22: mol_type = other RNA
aggcgttgggggaggggaagcg

SEQ ID NO: 10173 - RNA, 22 nt, synthetic construct
  source 1..22: mol_type = other RNA
aggctagccggaagcgctcctc

SEQ ID NO: 10174 - RNA, 22 nt, synthetic construct
  source 1..22: mol_type = other RNA
aggctatctcagacacgctgtg

SEQ ID NO: 10175 - RNA, 22 nt, synthetic construct
  source 1..22: mol_type = other RNA
aggctcgaaccctacacattca

SEQ ID NO: 10176 - RNA, 22 nt, synthetic construct
  source 1..22: mol_type = other RNA
aggctctctgaggagccggagc

SEQ ID NO: 10177 - RNA, 22 nt, synthetic construct
  source 1..22: mol_type = other RNA
aggctgtgcttcggcgctccgg

SEQ ID NO: 10178 - RNA, 22 nt, synthetic construct
  source 1..22: mol_type = other RNA
agggaaagagaattcataaagg

SEQ ID NO: 10179 - RNA, 22 nt, synthetic construct
  source 1..22: mol_type = other RNA
agggaaagaggggggccggcac

SEQ ID NO: 10180 - RNA, 22 nt, synthetic construct
  source 1..22: mol_type = other RNA
agggaaaggggtggctggatgc

SEQ ID NO: 10181 - RNA, 22 nt, synthetic construct
  source 1..22: mol_type = other RNA
agggaaaggtaaacgtggagta

SEQ ID NO: 10182 - RNA, 22 nt, synthetic construct
  source 1..22: mol_type = other RNA
agggaaagttaaactgttggga

SEQ ID NO: 10183 - RNA, 22 nt, synthetic construct
  source 1..22: mol_type = other RNA
agggaaggcgtccaggaagatt

SEQ ID NO: 10184 - RNA, 22 nt, synthetic construct
  source 1..22: mol_type = other RNA
agggaagggtcacctcctccgt

SEQ ID NO: 10185 - RNA, 22 nt, synthetic construct
  source 1..22: mol_type = other RNA
agggaatatttttctgcctttg

SEQ ID NO: 10186 - RNA, 22 nt, synthetic construct
  source 1..22: mol_type = other RNA
agggagaagggagcggaaaatg

SEQ ID NO: 10187 - RNA, 22 nt, synthetic construct
  source 1..22: mol_type = other RNA
agggagagagatccccctctaa

SEQ ID NO: 10188 - RNA, 22 nt, synthetic construct
  source 1..22: mol_type = other RNA
agggagcggaaaatgctcgaaa

SEQ ID NO: 10189 - RNA, 22 nt, synthetic construct
  source 1..22: mol_type = other RNA
agggaggagcgcttccggctag

SEQ ID NO: 10190 - RNA, 22 nt, synthetic construct
  source 1..22: mol_type = other RNA
agggaggcccgccctgcggcaa

SEQ ID NO: 10191 - RNA, 22 nt, synthetic construct
  source 1..22: mol_type = other RNA
agggcagcaagaggcctctcct

SEQ ID NO: 10192 - RNA, 22 nt, synthetic construct
  source 1..22: mol_type = other RNA
agggccaggcccacgacccaag

SEQ ID NO: 10193 - RNA, 22 nt, synthetic construct
  source 1..22: mol_type = other RNA
agggccagggaaagaggggggc

SEQ ID NO: 10194 - RNA, 22 nt, synthetic construct
  source 1..22: mol_type = other RNA
agggcccggtcccacagcttcg

SEQ ID NO: 10195 - RNA, 22 nt, synthetic construct
  source 1..22: mol_type = other RNA
agggcgagacaagcccgacctg

SEQ ID NO: 10196 - RNA, 22 nt, synthetic construct
  source 1..22: mol_type = other RNA
agggcgggcctccctcccgcct

SEQ ID NO: 10197 - RNA, 22 nt, synthetic construct
  source 1..22: mol_type = other RNA
agggctctttcctacactcctc

SEQ ID NO: 10198 - RNA, 22 nt, synthetic construct
  source 1..22: mol_type = other RNA
aggggaagcgtcctgacccagg

SEQ ID NO: 10199 - RNA, 22 nt, synthetic construct
  source 1..22: mol_type = other RNA
aggggagatcgcggcccccaga

SEQ ID NO: 10200 - RNA, 22 nt, synthetic construct
  source 1..22: mol_type = other RNA
aggggagcggaactctggtggg

SEQ ID NO: 10201 - RNA, 22 nt, synthetic construct
  source 1..22: mol_type = other RNA
aggggagggaagggtcacctcc

SEQ ID NO: 10202 - RNA, 22 nt, synthetic construct
  source 1..22: mol_type = other RNA
aggggagggtcagtgaaatcgg

SEQ ID NO: 10203 - RNA, 22 nt, synthetic construct
  source 1..22: mol_type = other RNA
aggggagggtgggaggacgccc

SEQ ID NO: 10204 - RNA, 22 nt, synthetic construct
  source 1..22: mol_type = other RNA
aggggaggtgcggtacactggg

SEQ ID NO: 10205 - RNA, 22 nt, synthetic construct
  source 1..22: mol_type = other RNA
aggggcgcggggccagacactg

SEQ ID NO: 10206 - RNA, 22 nt, synthetic construct
  source 1..22: mol_type = other RNA
aggggctttcccaacagtttaa

SEQ ID NO: 10207 - RNA, 22 nt, synthetic construct
  source 1..22: mol_type = other RNA
agggggagggagaagggagcgg

SEQ ID NO: 10208 - RNA, 22 nt, synthetic construct
  source 1..22: mol_type = other RNA
agggggagttgggtcgcctaga

SEQ ID NO: 10209 - RNA, 22 nt, synthetic construct
  source 1..22: mol_type = other RNA
agggggatctctctccctggga

SEQ ID NO: 10210 - RNA, 22 nt, synthetic construct
  source 1..22: mol_type = other RNA
agggggcaacgcgagagtcgct

SEQ ID NO: 10211 - RNA, 22 nt, synthetic construct
  source 1..22: mol_type = other RNA
aggggggccggcactactgtgt

SEQ ID NO: 10212 - RNA, 22 nt, synthetic construct
  source 1..22: mol_type = other RNA
aggggggccgtctggtggcttg

SEQ ID NO: 10213 - RNA, 22 nt, synthetic construct
  source 1..22: mol_type = other RNA
aggggggtgagaagtggcagca

SEQ ID NO: 10214 - RNA, 22 nt, synthetic construct
  source 1..22: mol_type = other RNA
agggggtgaagaggcgttgggg

SEQ ID NO: 10215 - RNA, 22 nt, synthetic construct
  source 1..22: mol_type = other RNA
aggggtggctggatgcaggcgg

SEQ ID NO: 10216 - RNA, 22 nt, synthetic construct
  source 1..22: mol_type = other RNA
agggtcacctcctccgtctccc

SEQ ID NO: 10217 - RNA, 22 nt, synthetic construct
  source 1..22: mol_type = other RNA
agggtcagtgaaatcggctctg

SEQ ID NO: 10218 - RNA, 22 nt, synthetic construct
  source 1..22: mol_type = other RNA
agggtccgacagaaaagagacc

SEQ ID NO: 10219 - RNA, 22 nt, synthetic construct
  source 1..22: mol_type = other RNA
agggtgggaggacgcccgcgcc

SEQ ID NO: 10220 - RNA, 22 nt, synthetic construct
  source 1..22: mol_type = other RNA
agggttcgagcctggagttgag

SEQ ID NO: 10221 - RNA, 22 nt, synthetic construct
  source 1..22: mol_type = other RNA
aggtaaacgtggagtaggcagt

SEQ ID NO: 10222 - RNA, 22 nt, synthetic construct
  source 1..22: mol_type = other RNA
aggtaaatcgcatgagagggaa

SEQ ID NO: 10223 - RNA, 22 nt, synthetic construct
  source 1..22: mol_type = other RNA
aggtaagggtccgacagaaaag

SEQ ID NO: 10224 - RNA, 22 nt, synthetic construct
  source 1..22: mol_type = other RNA
aggtaatgcctttgggaagcag

SEQ ID NO: 10225 - RNA, 22 nt, synthetic construct
  source 1..22: mol_type = other RNA
aggtaggggagcggaactctgg

SEQ ID NO: 10226 - RNA, 22 nt, synthetic construct
  source 1..22: mol_type = other RNA
aggtaggtggggtgtagagatg

SEQ ID NO: 10227 - RNA, 22 nt, synthetic construct
  source 1..22: mol_type = other RNA
aggtcgggcttgtctcgccctt

SEQ ID NO: 10228 - RNA, 22 nt, synthetic construct
  source 1..22: mol_type = other RNA
aggtgacccttccctcccctgg

SEQ ID NO: 10229 - RNA, 22 nt, synthetic construct
  source 1..22: mol_type = other RNA
aggtgcggtacactggggggat

SEQ ID NO: 10230 - RNA, 22 nt, synthetic construct
  source 1..22: mol_type = other RNA
aggtgggaagccagaaaacgag

SEQ ID NO: 10231 - RNA, 22 nt, synthetic construct
  source 1..22: mol_type = other RNA
aggtgggggtggggggcagaaa

SEQ ID NO: 10232 - RNA, 22 nt, synthetic construct
  source 1..22: mol_type = other RNA
aggtggggtgtagagatgctgg

SEQ ID NO: 10233 - RNA, 22 nt, synthetic construct
  source 1..22: mol_type = other RNA
aggtgtcgaagacaagcaggcg

SEQ ID NO: 10234 - RNA, 22 nt, synthetic construct
  source 1..22: mol_type = other RNA
aggttcggtctcttttctgtcg

SEQ ID NO: 10235 - RNA, 22 nt, synthetic construct
  source 1..22: mol_type = other RNA
agtaaaacgacacaatctggct

SEQ ID NO: 10236 - RNA, 22 nt, synthetic construct
  source 1..22: mol_type = other RNA
agtaaagctcctgtcagttacg

SEQ ID NO: 10237 - RNA, 22 nt, synthetic construct
  source 1..22: mol_type = other RNA
agtacgcagccgcttagcgact

SEQ ID NO: 10238 - RNA, 22 nt, synthetic construct
  source 1..22: mol_type = other RNA
agtagcaagggcccggtcccac

SEQ ID NO: 10239 - RNA, 22 nt, synthetic construct
  source 1..22: mol_type = other RNA
agtaggcagttcccaggaaagg

SEQ ID NO: 10240 - RNA, 22 nt, synthetic construct
  source 1..22: mol_type = other RNA
agtaggtaaatcgcatgagagg

SEQ ID NO: 10241 - RNA, 22 nt, synthetic construct
  source 1..22: mol_type = other RNA
agtagtgccggcccccctcttt

SEQ ID NO: 10242 - RNA, 22 nt, synthetic construct
  source 1..22: mol_type = other RNA
agtatgcctgtgtatttcgagc

SEQ ID NO: 10243 - RNA, 22 nt, synthetic construct
  source 1..22: mol_type = other RNA
agtcccgccagtccgccaacac

SEQ ID NO: 10244 - RNA, 22 nt, synthetic construct
  source 1..22: mol_type = other RNA
agtccgccaacacagtagtgcc

SEQ ID NO: 10245 - RNA, 22 nt, synthetic construct
  source 1..22: mol_type = other RNA
agtcctgccgcctcccgggagt

SEQ ID NO: 10246 - RNA, 22 nt, synthetic construct
  source 1..22: mol_type = other RNA
agtccttgcttgtctcacttct

SEQ ID NO: 10247 - RNA, 22 nt, synthetic construct
  source 1..22: mol_type = other RNA
agtcgctaagcggctgcgtact

SEQ ID NO: 10248 - RNA, 22 nt, synthetic construct
  source 1..22: mol_type = other RNA
agtcgggaacataatgtttgtt

SEQ ID NO: 10249 - RNA, 22 nt, synthetic construct
  source 1..22: mol_type = other RNA
agtcgggaatgtgaagaggagt

SEQ ID NO: 10250 - RNA, 22 nt, synthetic construct
  source 1..22: mol_type = other RNA
agtcggtttacccgccgcctgc

SEQ ID NO: 10251 - RNA, 22 nt, synthetic construct
  source 1..22: mol_type = other RNA
agtctcacatgagcgaaaccac

SEQ ID NO: 10252 - RNA, 22 nt, synthetic construct
  source 1..22: mol_type = other RNA
agtctctgagcgcaggcgggcg

SEQ ID NO: 10253 - RNA, 22 nt, synthetic construct
  source 1..22: mol_type = other RNA
agtgaaatcggctctggcgcgg

SEQ ID NO: 10254 - RNA, 22 nt, synthetic construct
  source 1..22: mol_type = other RNA
agtgagacaagcaaggactcta

SEQ ID NO: 10255 - RNA, 22 nt, synthetic construct
  source 1..22: mol_type = other RNA
agtgccggcccccctctttccc

SEQ ID NO: 10256 - RNA, 22 nt, synthetic construct
  source 1..22: mol_type = other RNA
agtgcctgtagcaggtcgggct

SEQ ID NO: 10257 - RNA, 22 nt, synthetic construct
  source 1..22: mol_type = other RNA
agtggcagcatcctcctaagag

SEQ ID NO: 10258 - RNA, 22 nt, synthetic construct
  source 1..22: mol_type = other RNA
agtggcgtttccgctcgggcag

SEQ ID NO: 10259 - RNA, 22 nt, synthetic construct
  source 1..22: mol_type = other RNA
agtgggccaatgggtgcggggc

SEQ ID NO: 10260 - RNA, 22 nt, synthetic construct
  source 1..22: mol_type = other RNA
agtggtctttctcttggatatg

SEQ ID NO: 10261 - RNA, 22 nt, synthetic construct
  source 1..22: mol_type = other RNA
agtggtttcgctcatgtgagac

SEQ ID NO: 10262 - RNA, 22 nt, synthetic construct
  source 1..22: mol_type = other RNA
agtgtaccgcacctcccctccc

SEQ ID NO: 10263 - RNA, 22 nt, synthetic construct
  source 1..22: mol_type = other RNA
agtgtaggaaagagccctggtt

SEQ ID NO: 10264 - RNA, 22 nt, synthetic construct
  source 1..22: mol_type = other RNA
agtgtctggccccgcgcccctg

SEQ ID NO: 10265 - RNA, 22 nt, synthetic construct
  source 1..22: mol_type = other RNA
agttaaactgttgggaaagccc

SEQ ID NO: 10266 - RNA, 22 nt, synthetic construct
  source 1..22: mol_type = other RNA
agttacgccgtcgggagtacgc

SEQ ID NO: 10267 - RNA, 22 nt, synthetic construct
  source 1..22: mol_type = other RNA
agttaggcccaacgcggcgcca

SEQ ID NO: 10268 - RNA, 22 nt, synthetic construct
  source 1..22: mol_type = other RNA
agttcccaggaaagggggtgaa

SEQ ID NO: 10269 - RNA, 22 nt, synthetic construct
  source 1..22: mol_type = other RNA
agttccgctcccctacctagcc

SEQ ID NO: 10270 - RNA, 22 nt, synthetic construct
  source 1..22: mol_type = other RNA
agttgagccagattgtgtcgtt

SEQ ID NO: 10271 - RNA, 22 nt, synthetic construct
  source 1..22: mol_type = other RNA
agttgggtcgcctagattagag

SEQ ID NO: 10272 - RNA, 22 nt, synthetic construct
  source 1..22: mol_type = other RNA
agttgtctgtcacaaggccgcg

SEQ ID NO: 10273 - RNA, 22 nt, synthetic construct
  source 1..22: mol_type = other RNA
agtttaactttccctctcatgc

SEQ ID NO: 10274 - RNA, 22 nt, synthetic construct
  source 1..22: mol_type = other RNA
ataaagggaatatttttctgcc

SEQ ID NO: 10275 - RNA, 22 nt, synthetic construct
  source 1..22: mol_type = other RNA
ataatgtttgttacgttgggag

SEQ ID NO: 10276 - RNA, 22 nt, synthetic construct
  source 1..22: mol_type = other RNA
atacgccatttgtgttttcaca

SEQ ID NO: 10277 - RNA, 22 nt, synthetic construct
  source 1..22: mol_type = other RNA
atagaaggggctttcccaacag

SEQ ID NO: 10278 - RNA, 22 nt, synthetic construct
  source 1..22: mol_type = other RNA
atagaatcaattagcatagaag

SEQ ID NO: 10279 - RNA, 22 nt, synthetic construct
  source 1..22: mol_type = other RNA
atagagtccttgcttgtctcac

SEQ ID NO: 10280 - RNA, 22 nt, synthetic construct
  source 1..22: mol_type = other RNA
atagcctcgttgaatgtgtagg

SEQ ID NO: 10281 - RNA, 22 nt, synthetic construct
  source 1..22: mol_type = other RNA
atatccaagagaaagaccactg

SEQ ID NO: 10282 - RNA, 22 nt, synthetic construct
  source 1..22: mol_type = other RNA
atatcttcaaaggcagaaaaat

SEQ ID NO: 10283 - RNA, 22 nt, synthetic construct
  source 1..22: mol_type = other RNA
atattccctttatgaattctct

SEQ ID NO: 10284 - RNA, 22 nt, synthetic construct
  source 1..22: mol_type = other RNA
atattctcacaagatcgttctc

SEQ ID NO: 10285 - RNA, 22 nt, synthetic construct
  source 1..22: mol_type = other RNA
atatttttctgcctttgaagat

SEQ ID NO: 10286 - RNA, 22 nt, synthetic construct
  source 1..22: mol_type = other RNA
atcaattagcatagaaggggct

SEQ ID NO: 10287 - RNA, 22 nt, synthetic construct
  source 1..22: mol_type = other RNA
atcagagttgtctgtcacaagg

SEQ ID NO: 10288 - RNA, 22 nt, synthetic construct
  source 1..22: mol_type = other RNA
atcagcggaagccgccggggcc

SEQ ID NO: 10289 - RNA, 22 nt, synthetic construct
  source 1..22: mol_type = other RNA
atcaggtgtcgaagacaagcag

SEQ ID NO: 10290 - RNA, 22 nt, synthetic construct
  source 1..22: mol_type = other RNA
atccaagagaaagaccactgac

SEQ ID NO: 10291 - RNA, 22 nt, synthetic construct
  source 1..22: mol_type = other RNA
atccagaagtctcggccggcag

SEQ ID NO: 10292 - RNA, 22 nt, synthetic construct
  source 1..22: mol_type = other RNA
atccagccacccctttccctcc

SEQ ID NO: 10293 - RNA, 22 nt, synthetic construct
  source 1..22: mol_type = other RNA
atccatatccaagagaaagacc

SEQ ID NO: 10294 - RNA, 22 nt, synthetic construct
  source 1..22: mol_type = other RNA
atcccccactccctacccccgt

SEQ ID NO: 10295 - RNA, 22 nt, synthetic construct
  source 1..22: mol_type = other RNA
atccccccagtgtaccgcacct

SEQ ID NO: 10296 - RNA, 22 nt, synthetic construct
  source 1..22: mol_type = other RNA
atccccctctaatctaggcgac

SEQ ID NO: 10297 - RNA, 22 nt, synthetic construct
  source 1..22: mol_type = other RNA
atccccgtgcggtcagtggcgt

SEQ ID NO: 10298 - RNA, 22 nt, synthetic construct
  source 1..22: mol_type = other RNA
atcctcctaagagcttggggag

SEQ ID NO: 10299 - RNA, 22 nt, synthetic construct
  source 1..22: mol_type = other RNA
atcgcatgagagggaaagttaa

SEQ ID NO: 10300 - RNA, 22 nt, synthetic construct
  source 1..22: mol_type = other RNA
atcgcggcccccagagcgatca

SEQ ID NO: 10301 - RNA, 22 nt, synthetic construct
  source 1..22: mol_type = other RNA
atcgctctgggggccgcgatct

SEQ ID NO: 10302 - RNA, 22 nt, synthetic construct
  source 1..22: mol_type = other RNA
atcggcgacaagaggctagccg

SEQ ID NO: 10303 - RNA, 22 nt, synthetic construct
  source 1..22: mol_type = other RNA
atcggctctggcgcgggcgtcc

SEQ ID NO: 10304 - RNA, 22 nt, synthetic construct
  source 1..22: mol_type = other RNA
atcgggccccaggggagggaag

SEQ ID NO: 10305 - RNA, 22 nt, synthetic construct
  source 1..22: mol_type = other RNA
atcgtgaggttcggtctctttt

SEQ ID NO: 10306 - RNA, 22 nt, synthetic construct
  source 1..22: mol_type = other RNA
atcgttctccacgcccaaggca

SEQ ID NO: 10307 - RNA, 22 nt, synthetic construct
  source 1..22: mol_type = other RNA
atctaggcgacccaactccccc

SEQ ID NO: 10308 - RNA, 22 nt, synthetic construct
  source 1..22: mol_type = other RNA
atctcagacacgctgtggcaca

SEQ ID NO: 10309 - RNA, 22 nt, synthetic construct
  source 1..22: mol_type = other RNA
atctcccctccgtaatcttcct

SEQ ID NO: 10310 - RNA, 22 nt, synthetic construct
  source 1..22: mol_type = other RNA
atctctacaccccacctaccta

SEQ ID NO: 10311 - RNA, 22 nt, synthetic construct
  source 1..22: mol_type = other RNA
atctctctccctgggaaaatgg

SEQ ID NO: 10312 - RNA, 22 nt, synthetic construct
  source 1..22: mol_type = other RNA
atctgaggtgggaagccagaaa

SEQ ID NO: 10313 - RNA, 22 nt, synthetic construct
  source 1..22: mol_type = other RNA
atctggctcaactccaggctcg

SEQ ID NO: 10314 - RNA, 22 nt, synthetic construct
  source 1..22: mol_type = other RNA
atcttcaaaggcagaaaaatat

SEQ ID NO: 10315 - RNA, 22 nt, synthetic construct
  source 1..22: mol_type = other RNA
atcttcctggacgccttccctc

SEQ ID NO: 10316 - RNA, 22 nt, synthetic construct
  source 1..22: mol_type = other RNA
atcttgtgagaatatcttcaaa

SEQ ID NO: 10317 - RNA, 22 nt, synthetic construct
  source 1..22: mol_type = other RNA
atgaaagggggagttgggtcgc

SEQ ID NO: 10318 - RNA, 22 nt, synthetic construct
  source 1..22: mol_type = other RNA
atgaattctctttccctctgcg

SEQ ID NO: 10319 - RNA, 22 nt, synthetic construct
  source 1..22: mol_type = other RNA
atgagagggaaagttaaactgt

SEQ ID NO: 10320 - RNA, 22 nt, synthetic construct
  source 1..22: mol_type = other RNA
atgagcgaaaccactgcgcggg

SEQ ID NO: 10321 - RNA, 22 nt, synthetic construct
  source 1..22: mol_type = other RNA
atgcaggcgggagggaggcccg

SEQ ID NO: 10322 - RNA, 22 nt, synthetic construct
  source 1..22: mol_type = other RNA
atgcctgtgtatttcgagcgga

SEQ ID NO: 10323 - RNA, 22 nt, synthetic construct
  source 1..22: mol_type = other RNA
atgcctttgggaagcagccatc

SEQ ID NO: 10324 - RNA, 22 nt, synthetic construct
  source 1..22: mol_type = other RNA
atgcgatttacctacttgaacc

SEQ ID NO: 10325 - RNA, 22 nt, synthetic construct
  source 1..22: mol_type = other RNA
atgctaattgattctatagagt

SEQ ID NO: 10326 - RNA, 22 nt, synthetic construct
  source 1..22: mol_type = other RNA
atgctcgaaaccggacggagcc

SEQ ID NO: 10327 - RNA, 22 nt, synthetic construct
  source 1..22: mol_type = other RNA
atgctgccacttctcacccccc

SEQ ID NO: 10328 - RNA, 22 nt, synthetic construct
  source 1..22: mol_type = other RNA
atgctgggtgtgcgggcgcggc

SEQ ID NO: 10329 - RNA, 22 nt, synthetic construct
  source 1..22: mol_type = other RNA
atggcccgtacccgtgaggtgg

SEQ ID NO: 10330 - RNA, 22 nt, synthetic construct
  source 1..22: mol_type = other RNA
atggcgtattctggttggagta

SEQ ID NO: 10331 - RNA, 22 nt, synthetic construct
  source 1..22: mol_type = other RNA
atggctccgtccggtttcgagc

SEQ ID NO: 10332 - RNA, 22 nt, synthetic construct
  source 1..22: mol_type = other RNA
atggctgcttcccaaaggcatt

SEQ ID NO: 10333 - RNA, 22 nt, synthetic construct
  source 1..22: mol_type = other RNA
atggggtgttgcaacggtgtgt

SEQ ID NO: 10334 - RNA, 22 nt, synthetic construct
  source 1..22: mol_type = other RNA
atgggtgcggggcggtgggcgg

SEQ ID NO: 10335 - RNA, 22 nt, synthetic construct
  source 1..22: mol_type = other RNA
atgggtggctaggggggccgtc

SEQ ID NO: 10336 - RNA, 22 nt, synthetic construct
  source 1..22: mol_type = other RNA
atgtgaagaggagtgtaggaaa

SEQ ID NO: 10337 - RNA, 22 nt, synthetic construct
  source 1..22: mol_type = other RNA
atgtgagactcgagccagtagc

SEQ ID NO: 10338 - RNA, 22 nt, synthetic construct
  source 1..22: mol_type = other RNA
atgtgtagggttcgagcctgga

SEQ ID NO: 10339 - RNA, 22 nt, synthetic construct
  source 1..22: mol_type = other RNA
atgttcccgacttcccacggga

SEQ ID NO: 10340 - RNA, 22 nt, synthetic construct
  source 1..22: mol_type = other RNA
atgtttgttacgttgggaggga

SEQ ID NO: 10341 - RNA, 22 nt, synthetic construct
  source 1..22: mol_type = other RNA
atgtttttcctgggtcaggacg

SEQ ID NO: 10342 - RNA, 22 nt, synthetic construct
  source 1..22: mol_type = other RNA
attaccttcgccacccccacca

SEQ ID NO: 10343 - RNA, 22 nt, synthetic construct
  source 1..22: mol_type = other RNA
attacggaggggagatcgcggc

SEQ ID NO: 10344 - RNA, 22 nt, synthetic construct
  source 1..22: mol_type = other RNA
attagagggggatctctctccc

SEQ ID NO: 10345 - RNA, 22 nt, synthetic construct
  source 1..22: mol_type = other RNA
attagcatagaaggggctttcc

SEQ ID NO: 10346 - RNA, 22 nt, synthetic construct
  source 1..22: mol_type = other RNA
attatgttcccgacttcccacg

SEQ ID NO: 10347 - RNA, 22 nt, synthetic construct
  source 1..22: mol_type = other RNA
attcaacgaggctatctcagac

SEQ ID NO: 10348 - RNA, 22 nt, synthetic construct
  source 1..22: mol_type = other RNA
attcataaagggaatatttttc

SEQ ID NO: 10349 - RNA, 22 nt, synthetic construct
  source 1..22: mol_type = other RNA
attcccagcgccggcgccaggg

SEQ ID NO: 10350 - RNA, 22 nt, synthetic construct
  source 1..22: mol_type = other RNA
attcccgacttacacgcagagg

SEQ ID NO: 10351 - RNA, 22 nt, synthetic construct
  source 1..22: mol_type = other RNA
attcccggccaggaaacgccgt

SEQ ID NO: 10352 - RNA, 22 nt, synthetic construct
  source 1..22: mol_type = other RNA
attccctttatgaattctcttt

SEQ ID NO: 10353 - RNA, 22 nt, synthetic construct
  source 1..22: mol_type = other RNA
attctatagagtccttgcttgt

SEQ ID NO: 10354 - RNA, 22 nt, synthetic construct
  source 1..22: mol_type = other RNA
attctcacaagatcgttctcca

SEQ ID NO: 10355 - RNA, 22 nt, synthetic construct
  source 1..22: mol_type = other RNA
attctctttccctctgcgtgta

SEQ ID NO: 10356 - RNA, 22 nt, synthetic construct
  source 1..22: mol_type = other RNA
attctggttggagtaaagctcc

SEQ ID NO: 10357 - RNA, 22 nt, synthetic construct
  source 1..22: mol_type = other RNA
attgattctatagagtccttgc

SEQ ID NO: 10358 - RNA, 22 nt, synthetic construct
  source 1..22: mol_type = other RNA
attgctctcgcagagggaggag

SEQ ID NO: 10359 - RNA, 22 nt, synthetic construct
  source 1..22: mol_type = other RNA
attggcccactcgccgccaatc

SEQ ID NO: 10360 - RNA, 22 nt, synthetic construct
  source 1..22: mol_type = other RNA
attggccgtttctcctcccgcc

SEQ ID NO: 10361 - RNA, 22 nt, synthetic construct
  source 1..22: mol_type = other RNA
attggcctctccgcccaccgcc

SEQ ID NO: 10362 - RNA, 22 nt, synthetic construct
  source 1..22: mol_type = other RNA
attggcggcgagtgggccaatg

SEQ ID NO: 10363 - RNA, 22 nt, synthetic construct
  source 1..22: mol_type = other RNA
attggctgtcgaagctgtggga

SEQ ID NO: 10364 - RNA, 22 nt, synthetic construct
  source 1..22: mol_type = other RNA
attgtgtcgttttacttgcctt

SEQ ID NO: 10365 - RNA, 22 nt, synthetic construct
  source 1..22: mol_type = other RNA
atttacctacttgaaccagggc

SEQ ID NO: 10366 - RNA, 22 nt, synthetic construct
  source 1..22: mol_type = other RNA
atttcactgaccctcccctccc

SEQ ID NO: 10367 - RNA, 22 nt, synthetic construct
  source 1..22: mol_type = other RNA
atttcgagcggagggcagcaag

SEQ ID NO: 10368 - RNA, 22 nt, synthetic construct
  source 1..22: mol_type = other RNA
atttgtgttttcacacacggcg

SEQ ID NO: 10369 - RNA, 22 nt, synthetic construct
  source 1..22: mol_type = other RNA
attttcccagggagagagatcc

SEQ ID NO: 10370 - RNA, 22 nt, synthetic construct
  source 1..22: mol_type = other RNA
attttccgctcccttctccctc

SEQ ID NO: 10371 - RNA, 22 nt, synthetic construct
  source 1..22: mol_type = other RNA
atttttctgcctttgaagatat

SEQ ID NO: 10372 - RNA, 22 nt, synthetic construct
  source 1..22: mol_type = other RNA
caaacattatgttcccgacttc

SEQ ID NO: 10373 - RNA, 22 nt, synthetic construct
  source 1..22: mol_type = other RNA
caaaggcagaaaaatattccct

SEQ ID NO: 10374 - RNA, 22 nt, synthetic construct
  source 1..22: mol_type = other RNA
caaaggcattaccttcgccacc

SEQ ID NO: 10375 - RNA, 22 nt, synthetic construct
  source 1..22: mol_type = other RNA
caaatggcgtattctggttgga

SEQ ID NO: 10376 - RNA, 22 nt, synthetic construct
  source 1..22: mol_type = other RNA
caacacagtagtgccggccccc

SEQ ID NO: 10377 - RNA, 22 nt, synthetic construct
  source 1..22: mol_type = other RNA
caacaccccattttcccaggga

SEQ ID NO: 10378 - RNA, 22 nt, synthetic construct
  source 1..22: mol_type = other RNA
caacagtttaactttccctctc

SEQ ID NO: 10379 - RNA, 22 nt, synthetic construct
  source 1..22: mol_type = other RNA
caaccagaatacgccatttgtg

SEQ ID NO: 10380 - RNA, 22 nt, synthetic construct
  source 1..22: mol_type = other RNA
caacccccgcaagccaccagac

SEQ ID NO: 10381 - RNA, 22 nt, synthetic construct
  source 1..22: mol_type = other RNA
caaccggagggggagggagaag

SEQ ID NO: 10382 - RNA, 22 nt, synthetic construct
  source 1..22: mol_type = other RNA
caacgaggctatctcagacacg

SEQ ID NO: 10383 - RNA, 22 nt, synthetic construct
  source 1..22: mol_type = other RNA
caacgcctcttcaccccctttc

SEQ ID NO: 10384 - RNA, 22 nt, synthetic construct
  source 1..22: mol_type = other RNA
caacgcgagagtcgctaagcgg

SEQ ID NO: 10385 - RNA, 22 nt, synthetic construct
  source 1..22: mol_type = other RNA
caacgcggcgccacggcgtttc

SEQ ID NO: 10386 - RNA, 22 nt, synthetic construct
  source 1..22: mol_type = other RNA
caacggtgtgtgcaaggcggcg

SEQ ID NO: 10387 - RNA, 22 nt, synthetic construct
  source 1..22: mol_type = other RNA
caacgtaacaaacattatgttc

SEQ ID NO: 10388 - RNA, 22 nt, synthetic construct
  source 1..22: mol_type = other RNA
caacgtggcaggaagcgcgcgc

SEQ ID NO: 10389 - RNA, 22 nt, synthetic construct
  source 1..22: mol_type = other RNA
caactccaggctcgaaccctac

SEQ ID NO: 10390 - RNA, 22 nt, synthetic construct
  source 1..22: mol_type = other RNA
caactccccctttcatgttttt

SEQ ID NO: 10391 - RNA, 22 nt, synthetic construct
  source 1..22: mol_type = other RNA
caactctgatcgctctgggggc

SEQ ID NO: 10392 - RNA, 22 nt, synthetic construct
  source 1..22: mol_type = other RNA
caagaagtgagacaagcaagga

SEQ ID NO: 10393 - RNA, 22 nt, synthetic construct
  source 1..22: mol_type = other RNA
caagagaaagaccactgacgcc

SEQ ID NO: 10394 - RNA, 22 nt, synthetic construct
  source 1..22: mol_type = other RNA
caagaggcctctcctcaaggga

SEQ ID NO: 10395 - RNA, 22 nt, synthetic construct
  source 1..22: mol_type = other RNA
caagaggctagccggaagcgct

SEQ ID NO: 10396 - RNA, 22 nt, synthetic construct
  source 1..22: mol_type = other RNA
caagatcgttctccacgcccaa

SEQ ID NO: 10397 - RNA, 22 nt, synthetic construct
  source 1..22: mol_type = other RNA
caagcaaggactctatagaatc

SEQ ID NO: 10398 - RNA, 22 nt, synthetic construct
  source 1..22: mol_type = other RNA
caagcaggcggcgggtaaaccg

SEQ ID NO: 10399 - RNA, 22 nt, synthetic construct
  source 1..22: mol_type = other RNA
caagccaccagacggcccccct

SEQ ID NO: 10400 - RNA, 22 nt, synthetic construct
  source 1..22: mol_type = other RNA
caagcccgacctgctacaggca

SEQ ID NO: 10401 - RNA, 22 nt, synthetic construct
  source 1..22: mol_type = other RNA
caagctcttaggaggatgctgc

SEQ ID NO: 10402 - RNA, 22 nt, synthetic construct
  source 1..22: mol_type = other RNA
caaggactctatagaatcaatt

SEQ ID NO: 10403 - RNA, 22 nt, synthetic construct
  source 1..22: mol_type = other RNA
caaggagagcgagcgcggggag

SEQ ID NO: 10404 - RNA, 22 nt, synthetic construct
  source 1..22: mol_type = other RNA
caaggcaagtaaaacgacacaa

SEQ ID NO: 10405 - RNA, 22 nt, synthetic construct
  source 1..22: mol_type = other RNA
caaggccgcgagaacgggggta

SEQ ID NO: 10406 - RNA, 22 nt, synthetic construct
  source 1..22: mol_type = other RNA
caaggcggcgaggggggtgaga

SEQ ID NO: 10407 - RNA, 22 nt, synthetic construct
  source 1..22: mol_type = other RNA
caagggaaaggtaaacgtggag

SEQ ID NO: 10408 - RNA, 22 nt, synthetic construct
  source 1..22: mol_type = other RNA
caagggcccggtcccacagctt

SEQ ID NO: 10409 - RNA, 22 nt, synthetic construct
  source 1..22: mol_type = other RNA
caaggtaagggtccgacagaaa

SEQ ID NO: 10410 - RNA, 22 nt, synthetic construct
  source 1..22: mol_type = other RNA
caagtaaaacgacacaatctgg

SEQ ID NO: 10411 - RNA, 22 nt, synthetic construct
  source 1..22: mol_type = other RNA
caagtaggtaaatcgcatgaga

SEQ ID NO: 10412 - RNA, 22 nt, synthetic construct
  source 1..22: mol_type = other RNA
caatcagcggaagccgccgggg

SEQ ID NO: 10413 - RNA, 22 nt, synthetic construct
  source 1..22: mol_type = other RNA
caatcaggtgtcgaagacaagc

SEQ ID NO: 10414 - RNA, 22 nt, synthetic construct
  source 1..22: mol_type = other RNA
caatcggcgacaagaggctagc

SEQ ID NO: 10415 - RNA, 22 nt, synthetic construct
  source 1..22: mol_type = other RNA
caatctggctcaactccaggct

SEQ ID NO: 10416 - RNA, 22 nt, synthetic construct
  source 1..22: mol_type = other RNA
caatggcgcggcgggagggggc

SEQ ID NO: 10417 - RNA, 22 nt, synthetic construct
  source 1..22: mol_type = other RNA
caatggctccgtccggtttcga

SEQ ID NO: 10418 - RNA, 22 nt, synthetic construct
  source 1..22: mol_type = other RNA
caatgggtgcggggcggtgggc

SEQ ID NO: 10419 - RNA, 22 nt, synthetic construct
  source 1..22: mol_type = other RNA
caattagcatagaaggggcttt

SEQ ID NO: 10420 - RNA, 22 nt, synthetic construct
  source 1..22: mol_type = other RNA
cacaaatggcgtattctggttg

SEQ ID NO: 10421 - RNA, 22 nt, synthetic construct
  source 1..22: mol_type = other RNA
cacaagatcgttctccacgccc

SEQ ID NO: 10422 - RNA, 22 nt, synthetic construct
  source 1..22: mol_type = other RNA
cacaaggccgcgagaacggggg

SEQ ID NO: 10423 - RNA, 22 nt, synthetic construct
  source 1..22: mol_type = other RNA
cacaatctggctcaactccagg

SEQ ID NO: 10424 - RNA, 22 nt, synthetic construct
  source 1..22: mol_type = other RNA
cacacaccgttgcaacacccca

SEQ ID NO: 10425 - RNA, 22 nt, synthetic construct
  source 1..22: mol_type = other RNA
cacacacggcgggaggagaaac

SEQ ID NO: 10426 - RNA, 22 nt, synthetic construct
  source 1..22: mol_type = other RNA
cacacccagcatctctacaccc

SEQ ID NO: 10427 - RNA, 22 nt, synthetic construct
  source 1..22: mol_type = other RNA
cacaccgttgcaacaccccatt

SEQ ID NO: 10428 - RNA, 22 nt, synthetic construct
  source 1..22: mol_type = other RNA
cacacgccacggggagccagag

SEQ ID NO: 10429 - RNA, 22 nt, synthetic construct
  source 1..22: mol_type = other RNA
cacacggcgggaggagaaacgg

SEQ ID NO: 10430 - RNA, 22 nt, synthetic construct
  source 1..22: mol_type = other RNA
cacacgttctctggctccccgt

SEQ ID NO: 10431 - RNA, 22 nt, synthetic construct
  source 1..22: mol_type = other RNA
cacagcctcttctctaggcggc

SEQ ID NO: 10432 - RNA, 22 nt, synthetic construct
  source 1..22: mol_type = other RNA
cacagcgtgtctgagatagcct

SEQ ID NO: 10433 - RNA, 22 nt, synthetic construct
  source 1..22: mol_type = other RNA
cacagcttcgacagccaatcag

SEQ ID NO: 10434 - RNA, 22 nt, synthetic construct
  source 1..22: mol_type = other RNA
cacagtagtgccggcccccctc

SEQ ID NO: 10435 - RNA, 22 nt, synthetic construct
  source 1..22: mol_type = other RNA
cacatgagcgaaaccactgcgc

SEQ ID NO: 10436 - RNA, 22 nt, synthetic construct
  source 1..22: mol_type = other RNA
cacattcaacgaggctatctca

SEQ ID NO: 10437 - RNA, 22 nt, synthetic construct
  source 1..22: mol_type = other RNA
cacattcccgacttacacgcag

SEQ ID NO: 10438 - RNA, 22 nt, synthetic construct
  source 1..22: mol_type = other RNA
caccacacgttctctggctccc

SEQ ID NO: 10439 - RNA, 22 nt, synthetic construct
  source 1..22: mol_type = other RNA
caccagacggcccccctagcca

SEQ ID NO: 10440 - RNA, 22 nt, synthetic construct
  source 1..22: mol_type = other RNA
caccagagttccgctcccctac

SEQ ID NO: 10441 - RNA, 22 nt, synthetic construct
  source 1..22: mol_type = other RNA
cacccagcatctctacacccca

SEQ ID NO: 10442 - RNA, 22 nt, synthetic construct
  source 1..22: mol_type = other RNA
cacccagggggcaacgcgagag

SEQ ID NO: 10443 - RNA, 22 nt, synthetic construct
  source 1..22: mol_type = other RNA
cacccatccccccagtgtaccg

SEQ ID NO: 10444 - RNA, 22 nt, synthetic construct
  source 1..22: mol_type = other RNA
cacccattggcccactcgccgc

SEQ ID NO: 10445 - RNA, 22 nt, synthetic construct
  source 1..22: mol_type = other RNA
caccccacctacctacccgccc

SEQ ID NO: 10446 - RNA, 22 nt, synthetic construct
  source 1..22: mol_type = other RNA
caccccattttcccagggagag

SEQ ID NO: 10447 - RNA, 22 nt, synthetic construct
  source 1..22: mol_type = other RNA
cacccccaccacacgttctctg

SEQ ID NO: 10448 - RNA, 22 nt, synthetic construct
  source 1..22: mol_type = other RNA
cacccccacctcacgggtacgg

SEQ ID NO: 10449 - RNA, 22 nt, synthetic construct
  source 1..22: mol_type = other RNA
cacccccacgagtgcctgtagc

SEQ ID NO: 10450 - RNA, 22 nt, synthetic construct
  source 1..22: mol_type = other RNA
cacccccctcgccgccttgcac

SEQ ID NO: 10451 - RNA, 22 nt, synthetic construct
  source 1..22: mol_type = other RNA
cacccccgcgccccgcgcagtg

SEQ ID NO: 10452 - RNA, 22 nt, synthetic construct
  source 1..22: mol_type = other RNA
caccccctttcctgggaactgc

SEQ ID NO: 10453 - RNA, 22 nt, synthetic construct
  source 1..22: mol_type = other RNA
cacccctttccctcccaacgta

SEQ ID NO: 10454 - RNA, 22 nt, synthetic construct
  source 1..22: mol_type = other RNA
caccctccccttccttcggggg

SEQ ID NO: 10455 - RNA, 22 nt, synthetic construct
  source 1..22: mol_type = other RNA
caccgccccgcacccattggcc

SEQ ID NO: 10456 - RNA, 22 nt, synthetic construct
  source 1..22: mol_type = other RNA
caccgcctgaagggcgagacaa

SEQ ID NO: 10457 - RNA, 22 nt, synthetic construct
  source 1..22: mol_type = other RNA
caccgttgcaacaccccatttt

SEQ ID NO: 10458 - RNA, 22 nt, synthetic construct
  source 1..22: mol_type = other RNA
cacctacctacccgccccaccc

SEQ ID NO: 10459 - RNA, 22 nt, synthetic construct
  source 1..22: mol_type = other RNA
cacctcacgggtacgggccatt

SEQ ID NO: 10460 - RNA, 22 nt, synthetic construct
  source 1..22: mol_type = other RNA
cacctcagatggctgcttccca

SEQ ID NO: 10461 - RNA, 22 nt, synthetic construct
  source 1..22: mol_type = other RNA
cacctcccctcccaccagagtt

SEQ ID NO: 10462 - RNA, 22 nt, synthetic construct
  source 1..22: mol_type = other RNA
cacctcctccgtctccccgcgc

SEQ ID NO: 10463 - RNA, 22 nt, synthetic construct
  source 1..22: mol_type = other RNA
cacctgattggctgtcgaagct

SEQ ID NO: 10464 - RNA, 22 nt, synthetic construct
  source 1..22: mol_type = other RNA
cacgacccaaggagagcgagcg

SEQ ID NO: 10465 - RNA, 22 nt, synthetic construct
  source 1..22: mol_type = other RNA
cacgagtgcctgtagcaggtcg

SEQ ID NO: 10466 - RNA, 22 nt, synthetic construct
  source 1..22: mol_type = other RNA
cacgatcgggccccaggggagg

SEQ ID NO: 10467 - RNA, 22 nt, synthetic construct
  source 1..22: mol_type = other RNA
cacgcagagggaaagagaattc

SEQ ID NO: 10468 - RNA, 22 nt, synthetic construct
  source 1..22: mol_type = other RNA
cacgcagccccagtcccgccag

SEQ ID NO: 10469 - RNA, 22 nt, synthetic construct
  source 1..22: mol_type = other RNA
cacgccacggggagccagagaa

SEQ ID NO: 10470 - RNA, 22 nt, synthetic construct
  source 1..22: mol_type = other RNA
cacgcccaaggcaagtaaaacg

SEQ ID NO: 10471 - RNA, 22 nt, synthetic construct
  source 1..22: mol_type = other RNA
cacgccccctcccgccgcgcca

SEQ ID NO: 10472 - RNA, 22 nt, synthetic construct
  source 1..22: mol_type = other RNA
cacgctgtggcacacgccacgg

SEQ ID NO: 10473 - RNA, 22 nt, synthetic construct
  source 1..22: mol_type = other RNA
cacggcactcccgggaggcggc

SEQ ID NO: 10474 - RNA, 22 nt, synthetic construct
  source 1..22: mol_type = other RNA
cacggcgggaggagaaacggcc

SEQ ID NO: 10475 - RNA, 22 nt, synthetic construct
  source 1..22: mol_type = other RNA
cacggcgtttcctggccgggaa

SEQ ID NO: 10476 - RNA, 22 nt, synthetic construct
  source 1..22: mol_type = other RNA
cacgggaaaggcaacccccgca

SEQ ID NO: 10477 - RNA, 22 nt, synthetic construct
  source 1..22: mol_type = other RNA
cacggggagccagagaacgtgt

SEQ ID NO: 10478 - RNA, 22 nt, synthetic construct
  source 1..22: mol_type = other RNA
cacggggattcccagcgccggc

SEQ ID NO: 10479 - RNA, 22 nt, synthetic construct
  source 1..22: mol_type = other RNA
cacgggtacgggccattcccgg

SEQ ID NO: 10480 - RNA, 22 nt, synthetic construct
  source 1..22: mol_type = other RNA
cacgttctctggctccccgtgg

SEQ ID NO: 10481 - RNA, 22 nt, synthetic construct
  source 1..22: mol_type = other RNA
cacgttgcgcaggggcgcgggg

SEQ ID NO: 10482 - RNA, 22 nt, synthetic construct
  source 1..22: mol_type = other RNA
cacgtttacctttcccttgagg

SEQ ID NO: 10483 - RNA, 22 nt, synthetic construct
  source 1..22: mol_type = other RNA
cactactgtgttggcggactgg

SEQ ID NO: 10484 - RNA, 22 nt, synthetic construct
  source 1..22: mol_type = other RNA
cactcagcccgctgcccgagcg

SEQ ID NO: 10485 - RNA, 22 nt, synthetic construct
  source 1..22: mol_type = other RNA
cactcccgggaggcggcaggac

SEQ ID NO: 10486 - RNA, 22 nt, synthetic construct
  source 1..22: mol_type = other RNA
cactccctacccccgttctcgc

SEQ ID NO: 10487 - RNA, 22 nt, synthetic construct
  source 1..22: mol_type = other RNA
cactcctcttcacattcccgac

SEQ ID NO: 10488 - RNA, 22 nt, synthetic construct
  source 1..22: mol_type = other RNA
cactcgccgccaatcagcggaa

SEQ ID NO: 10489 - RNA, 22 nt, synthetic construct
  source 1..22: mol_type = other RNA
cactcgtgggggtgggggagga

SEQ ID NO: 10490 - RNA, 22 nt, synthetic construct
  source 1..22: mol_type = other RNA
cactgaccctcccctcccgccg

SEQ ID NO: 10491 - RNA, 22 nt, synthetic construct
  source 1..22: mol_type = other RNA
cactgaccgcacggggattccc

SEQ ID NO: 10492 - RNA, 22 nt, synthetic construct
  source 1..22: mol_type = other RNA
cactgacgcccaagaagtgaga

SEQ ID NO: 10493 - RNA, 22 nt, synthetic construct
  source 1..22: mol_type = other RNA
cactgcggcgctcggcctcggg

SEQ ID NO: 10494 - RNA, 22 nt, synthetic construct
  source 1..22: mol_type = other RNA
cactggggggatgggtggctag

SEQ ID NO: 10495 - RNA, 22 nt, synthetic construct
  source 1..22: mol_type = other RNA
cacttctcacccccctcgccgc

SEQ ID NO: 10496 - RNA, 22 nt, synthetic construct
  source 1..22: mol_type = other RNA
cacttcttgggcgtcagtggtc

SEQ ID NO: 10497 - RNA, 22 nt, synthetic construct
  source 1..22: mol_type = other RNA
cagaaaaatattccctttatga

SEQ ID NO: 10498 - RNA, 22 nt, synthetic construct
  source 1..22: mol_type = other RNA
cagaaaacgagagggaaggcgt

SEQ ID NO: 10499 - RNA, 22 nt, synthetic construct
  source 1..22: mol_type = other RNA
cagaaaagagaccgaacctcac

SEQ ID NO: 10500 - RNA, 22 nt, synthetic construct
  source 1..22: mol_type = other RNA
cagaaaggcggagcgagccaaa

SEQ ID NO: 10501 - RNA, 22 nt, synthetic construct
  source 1..22: mol_type = other RNA
cagaagtctcggccggcagccc

SEQ ID NO: 10502 - RNA, 22 nt, synthetic construct
  source 1..22: mol_type = other RNA
cagaatacgccatttgtgtttt

SEQ ID NO: 10503 - RNA, 22 nt, synthetic construct
  source 1..22: mol_type = other RNA
cagacaactctgatcgctctgg

SEQ ID NO: 10504 - RNA, 22 nt, synthetic construct
  source 1..22: mol_type = other RNA
cagacacgctgtggcacacgcc

SEQ ID NO: 10505 - RNA, 22 nt, synthetic construct
  source 1..22: mol_type = other RNA
cagacactgcggcgctcggcct

SEQ ID NO: 10506 - RNA, 22 nt, synthetic construct
  source 1..22: mol_type = other RNA
cagacggcccccctagccaccc

SEQ ID NO: 10507 - RNA, 22 nt, synthetic construct
  source 1..22: mol_type = other RNA
cagagaacgtgtggtgggggtg

SEQ ID NO: 10508 - RNA, 22 nt, synthetic construct
  source 1..22: mol_type = other RNA
cagagactcacgcagccccagt

SEQ ID NO: 10509 - RNA, 22 nt, synthetic construct
  source 1..22: mol_type = other RNA
cagagagcctcggctaggtagg

SEQ ID NO: 10510 - RNA, 22 nt, synthetic construct
  source 1..22: mol_type = other RNA
cagagccgatttcactgaccct

SEQ ID NO: 10511 - RNA, 22 nt, synthetic construct
  source 1..22: mol_type = other RNA
cagagcgatcagagttgtctgt

SEQ ID NO: 10512 - RNA, 22 nt, synthetic construct
  source 1..22: mol_type = other RNA
cagagggaaagagaattcataa

SEQ ID NO: 10513 - RNA, 22 nt, synthetic construct
  source 1..22: mol_type = other RNA
cagagggaggagcgcttccggc

SEQ ID NO: 10514 - RNA, 22 nt, synthetic construct
  source 1..22: mol_type = other RNA
cagagttccgctcccctaccta

SEQ ID NO: 10515 - RNA, 22 nt, synthetic construct
  source 1..22: mol_type = other RNA
cagagttgtctgtcacaaggcc

SEQ ID NO: 10516 - RNA, 22 nt, synthetic construct
  source 1..22: mol_type = other RNA
cagatggctgcttcccaaaggc

SEQ ID NO: 10517 - RNA, 22 nt, synthetic construct
  source 1..22: mol_type = other RNA
cagattgtgtcgttttacttgc

SEQ ID NO: 10518 - RNA, 22 nt, synthetic construct
  source 1..22: mol_type = other RNA
cagcaagaggcctctcctcaag

SEQ ID NO: 10519 - RNA, 22 nt, synthetic construct
  source 1..22: mol_type = other RNA
cagcatccatatccaagagaaa

SEQ ID NO: 10520 - RNA, 22 nt, synthetic construct
  source 1..22: mol_type = other RNA
cagcatcctcctaagagcttgg

SEQ ID NO: 10521 - RNA, 22 nt, synthetic construct
  source 1..22: mol_type = other RNA
cagcatctctacaccccaccta

SEQ ID NO: 10522 - RNA, 22 nt, synthetic construct
  source 1..22: mol_type = other RNA
cagccaatcaggtgtcgaagac

SEQ ID NO: 10523 - RNA, 22 nt, synthetic construct
  source 1..22: mol_type = other RNA
cagccacccctttccctcccaa

SEQ ID NO: 10524 - RNA, 22 nt, synthetic construct
  source 1..22: mol_type = other RNA
cagccatctgaggtgggaagcc

SEQ ID NO: 10525 - RNA, 22 nt, synthetic construct
  source 1..22: mol_type = other RNA
cagccccagtcccgccagtccg

SEQ ID NO: 10526 - RNA, 22 nt, synthetic construct
  source 1..22: mol_type = other RNA
cagcccgctgcccgagcggaaa

SEQ ID NO: 10527 - RNA, 22 nt, synthetic construct
  source 1..22: mol_type = other RNA
cagccgcttagcgactctcgcg

SEQ ID NO: 10528 - RNA, 22 nt, synthetic construct
  source 1..22: mol_type = other RNA
cagccggaccgacccccgctcc

SEQ ID NO: 10529 - RNA, 22 nt, synthetic construct
  source 1..22: mol_type = other RNA
cagcctcttctctaggcggccc

SEQ ID NO: 10530 - RNA, 22 nt, synthetic construct
  source 1..22: mol_type = other RNA
cagcgcctgggacaaggtaagg

SEQ ID NO: 10531 - RNA, 22 nt, synthetic construct
  source 1..22: mol_type = other RNA
cagcgcgcgcttcctgccacgt

SEQ ID NO: 10532 - RNA, 22 nt, synthetic construct
  source 1..22: mol_type = other RNA
cagcggaagccgccggggccgc

SEQ ID NO: 10533 - RNA, 22 nt, synthetic construct
  source 1..22: mol_type = other RNA
cagcgggctgagtgagctgccg

SEQ ID NO: 10534 - RNA, 22 nt, synthetic construct
  source 1..22: mol_type = other RNA
cagcgtgtctgagatagcctcg

SEQ ID NO: 10535 - RNA, 22 nt, synthetic construct
  source 1..22: mol_type = other RNA
cagctcactcagcccgctgccc

SEQ ID NO: 10536 - RNA, 22 nt, synthetic construct
  source 1..22: mol_type = other RNA
cagcttcgacagccaatcaggt

SEQ ID NO: 10537 - RNA, 22 nt, synthetic construct
  source 1..22: mol_type = other RNA
caggaaaaacatgaaaggggga

SEQ ID NO: 10538 - RNA, 22 nt, synthetic construct
  source 1..22: mol_type = other RNA
caggaaacgccgtggcgccgcg

SEQ ID NO: 10539 - RNA, 22 nt, synthetic construct
  source 1..22: mol_type = other RNA
caggaaagggggtgaagaggcg

SEQ ID NO: 10540 - RNA, 22 nt, synthetic construct
  source 1..22: mol_type = other RNA
caggaagattacggaggggaga

SEQ ID NO: 10541 - RNA, 22 nt, synthetic construct
  source 1..22: mol_type = other RNA
caggacgcttcccctcccccaa

SEQ ID NO: 10542 - RNA, 22 nt, synthetic construct
  source 1..22: mol_type = other RNA
caggactcgagttaggcccaac

SEQ ID NO: 10543 - RNA, 22 nt, synthetic construct
  source 1..22: mol_type = other RNA
caggagctttactccaaccaga

SEQ ID NO: 10544 - RNA, 22 nt, synthetic construct
  source 1..22: mol_type = other RNA
caggcactcgtgggggtggggg

SEQ ID NO: 10545 - RNA, 22 nt, synthetic construct
  source 1..22: mol_type = other RNA
caggcccacgacccaaggagag

SEQ ID NO: 10546 - RNA, 22 nt, synthetic construct
  source 1..22: mol_type = other RNA
caggccccggcagcgcctggga

SEQ ID NO: 10547 - RNA, 22 nt, synthetic construct
  source 1..22: mol_type = other RNA
caggcggcgggtaaaccgactc

SEQ ID NO: 10548 - RNA, 22 nt, synthetic construct
  source 1..22: mol_type = other RNA
caggcgggagggaggcccgccc

SEQ ID NO: 10549 - RNA, 22 nt, synthetic construct
  source 1..22: mol_type = other RNA
caggctcgaaccctacacattc

SEQ ID NO: 10550 - RNA, 22 nt, synthetic construct
  source 1..22: mol_type = other RNA
cagggaaagaggggggccggca

SEQ ID NO: 10551 - RNA, 22 nt, synthetic construct
  source 1..22: mol_type = other RNA
cagggagagagatccccctcta

SEQ ID NO: 10552 - RNA, 22 nt, synthetic construct
  source 1..22: mol_type = other RNA
cagggccagggaaagagggggg

SEQ ID NO: 10553 - RNA, 22 nt, synthetic construct
  source 1..22: mol_type = other RNA
cagggcgggcctccctcccgcc

SEQ ID NO: 10554 - RNA, 22 nt, synthetic construct
  source 1..22: mol_type = other RNA
cagggctctttcctacactcct

SEQ ID NO: 10555 - RNA, 22 nt, synthetic construct
  source 1..22: mol_type = other RNA
caggggagggaagggtcacctc

SEQ ID NO: 10556 - RNA, 22 nt, synthetic construct
  source 1..22: mol_type = other RNA
caggggcgcggggccagacact

SEQ ID NO: 10557 - RNA, 22 nt, synthetic construct
  source 1..22: mol_type = other RNA
cagggggcaacgcgagagtcgc

SEQ ID NO: 10558 - RNA, 22 nt, synthetic construct
  source 1..22: mol_type = other RNA
caggtcgggcttgtctcgccct

SEQ ID NO: 10559 - RNA, 22 nt, synthetic construct
  source 1..22: mol_type = other RNA
caggtgtcgaagacaagcaggc

SEQ ID NO: 10560 - RNA, 22 nt, synthetic construct
  source 1..22: mol_type = other RNA
cagtagcaagggcccggtccca

SEQ ID NO: 10561 - RNA, 22 nt, synthetic construct
  source 1..22: mol_type = other RNA
cagtagtgccggcccccctctt

SEQ ID NO: 10562 - RNA, 22 nt, synthetic construct
  source 1..22: mol_type = other RNA
cagtcccgccagtccgccaaca

SEQ ID NO: 10563 - RNA, 22 nt, synthetic construct
  source 1..22: mol_type = other RNA
cagtccgccaacacagtagtgc

SEQ ID NO: 10564 - RNA, 22 nt, synthetic construct
  source 1..22: mol_type = other RNA
cagtgaaatcggctctggcgcg

SEQ ID NO: 10565 - RNA, 22 nt, synthetic construct
  source 1..22: mol_type = other RNA
cagtggcgtttccgctcgggca

SEQ ID NO: 10566 - RNA, 22 nt, synthetic construct
  source 1..22: mol_type = other RNA
cagtggtctttctcttggatat

SEQ ID NO: 10567 - RNA, 22 nt, synthetic construct
  source 1..22: mol_type = other RNA
cagtggtttcgctcatgtgaga

SEQ ID NO: 10568 - RNA, 22 nt, synthetic construct
  source 1..22: mol_type = other RNA
cagtgtaccgcacctcccctcc

SEQ ID NO: 10569 - RNA, 22 nt, synthetic construct
  source 1..22: mol_type = other RNA
cagtgtctggccccgcgcccct

SEQ ID NO: 10570 - RNA, 22 nt, synthetic construct
  source 1..22: mol_type = other RNA
cagttacgccgtcgggagtacg

SEQ ID NO: 10571 - RNA, 22 nt, synthetic construct
  source 1..22: mol_type = other RNA
cagttcccaggaaagggggtga

SEQ ID NO: 10572 - RNA, 22 nt, synthetic construct
  source 1..22: mol_type = other RNA
cagtttaactttccctctcatg

SEQ ID NO: 10573 - RNA, 22 nt, synthetic construct
  source 1..22: mol_type = other RNA
cataaagggaatatttttctgc

SEQ ID NO: 10574 - RNA, 22 nt, synthetic construct
  source 1..22: mol_type = other RNA
cataatgtttgttacgttggga

SEQ ID NO: 10575 - RNA, 22 nt, synthetic construct
  source 1..22: mol_type = other RNA
catagaaggggctttcccaaca

SEQ ID NO: 10576 - RNA, 22 nt, synthetic construct
  source 1..22: mol_type = other RNA
catatccaagagaaagaccact

SEQ ID NO: 10577 - RNA, 22 nt, synthetic construct
  source 1..22: mol_type = other RNA
catccagaagtctcggccggca

SEQ ID NO: 10578 - RNA, 22 nt, synthetic construct
  source 1..22: mol_type = other RNA
catccagccacccctttccctc

SEQ ID NO: 10579 - RNA, 22 nt, synthetic construct
  source 1..22: mol_type = other RNA
catccatatccaagagaaagac

SEQ ID NO: 10580 - RNA, 22 nt, synthetic construct
  source 1..22: mol_type = other RNA
catccccccagtgtaccgcacc

SEQ ID NO: 10581 - RNA, 22 nt, synthetic construct
  source 1..22: mol_type = other RNA
catcctcctaagagcttgggga

SEQ ID NO: 10582 - RNA, 22 nt, synthetic construct
  source 1..22: mol_type = other RNA
catctctacaccccacctacct

SEQ ID NO: 10583 - RNA, 22 nt, synthetic construct
  source 1..22: mol_type = other RNA
catctgaggtgggaagccagaa

SEQ ID NO: 10584 - RNA, 22 nt, synthetic construct
  source 1..22: mol_type = other RNA
catgaaagggggagttgggtcg

SEQ ID NO: 10585 - RNA, 22 nt, synthetic construct
  source 1..22: mol_type = other RNA
catgagagggaaagttaaactg

SEQ ID NO: 10586 - RNA, 22 nt, synthetic construct
  source 1..22: mol_type = other RNA
catgagcgaaaccactgcgcgg

SEQ ID NO: 10587 - RNA, 22 nt, synthetic construct
  source 1..22: mol_type = other RNA
catgcgatttacctacttgaac

SEQ ID NO: 10588 - RNA, 22 nt, synthetic construct
  source 1..22: mol_type = other RNA
catgtgagactcgagccagtag

SEQ ID NO: 10589 - RNA, 22 nt, synthetic construct
  source 1..22: mol_type = other RNA
catgtttttcctgggtcaggac

SEQ ID NO: 10590 - RNA, 22 nt, synthetic construct
  source 1..22: mol_type = other RNA
cattaccttcgccacccccacc

SEQ ID NO: 10591 - RNA, 22 nt, synthetic construct
  source 1..22: mol_type = other RNA
cattatgttcccgacttcccac

SEQ ID NO: 10592 - RNA, 22 nt, synthetic construct
  source 1..22: mol_type = other RNA
cattcaacgaggctatctcaga

SEQ ID NO: 10593 - RNA, 22 nt, synthetic construct
  source 1..22: mol_type = other RNA
cattcccgacttacacgcagag

SEQ ID NO: 10594 - RNA, 22 nt, synthetic construct
  source 1..22: mol_type = other RNA
cattcccggccaggaaacgccg

SEQ ID NO: 10595 - RNA, 22 nt, synthetic construct
  source 1..22: mol_type = other RNA
cattgctctcgcagagggagga

SEQ ID NO: 10596 - RNA, 22 nt, synthetic construct
  source 1..22: mol_type = other RNA
cattggcccactcgccgccaat

SEQ ID NO: 10597 - RNA, 22 nt, synthetic construct
  source 1..22: mol_type = other RNA
cattggcctctccgcccaccgc

SEQ ID NO: 10598 - RNA, 22 nt, synthetic construct
  source 1..22: mol_type = other RNA
catttgtgttttcacacacggc

SEQ ID NO: 10599 - RNA, 22 nt, synthetic construct
  source 1..22: mol_type = other RNA
cattttcccagggagagagatc

SEQ ID NO: 10600 - RNA, 22 nt, synthetic construct
  source 1..22: mol_type = other RNA
cattttccgctcccttctccct

SEQ ID NO: 10601 - RNA, 22 nt, synthetic construct
  source 1..22: mol_type = other RNA
ccaaaggcattaccttcgccac

SEQ ID NO: 10602 - RNA, 22 nt, synthetic construct
  source 1..22: mol_type = other RNA
ccaacacagtagtgccggcccc

SEQ ID NO: 10603 - RNA, 22 nt, synthetic construct
  source 1..22: mol_type = other RNA
ccaacagtttaactttccctct

SEQ ID NO: 10604 - RNA, 22 nt, synthetic construct
  source 1..22: mol_type = other RNA
ccaaccagaatacgccatttgt

SEQ ID NO: 10605 - RNA, 22 nt, synthetic construct
  source 1..22: mol_type = other RNA
ccaacgcctcttcacccccttt

SEQ ID NO: 10606 - RNA, 22 nt, synthetic construct
  source 1..22: mol_type = other RNA
ccaacgcggcgccacggcgttt

SEQ ID NO: 10607 - RNA, 22 nt, synthetic construct
  source 1..22: mol_type = other RNA
ccaacgtaacaaacattatgtt

SEQ ID NO: 10608 - RNA, 22 nt, synthetic construct
  source 1..22: mol_type = other RNA
ccaactccccctttcatgtttt

SEQ ID NO: 10609 - RNA, 22 nt, synthetic construct
  source 1..22: mol_type = other RNA
ccaagaagtgagacaagcaagg

SEQ ID NO: 10610 - RNA, 22 nt, synthetic construct
  source 1..22: mol_type = other RNA
ccaagagaaagaccactgacgc

SEQ ID NO: 10611 - RNA, 22 nt, synthetic construct
  source 1..22: mol_type = other RNA
ccaagctcttaggaggatgctg

SEQ ID NO: 10612 - RNA, 22 nt, synthetic construct
  source 1..22: mol_type = other RNA
ccaaggagagcgagcgcgggga

SEQ ID NO: 10613 - RNA, 22 nt, synthetic construct
  source 1..22: mol_type = other RNA
ccaaggcaagtaaaacgacaca

SEQ ID NO: 10614 - RNA, 22 nt, synthetic construct
  source 1..22: mol_type = other RNA
ccaatcagcggaagccgccggg

SEQ ID NO: 10615 - RNA, 22 nt, synthetic construct
  source 1..22: mol_type = other RNA
ccaatcaggtgtcgaagacaag

SEQ ID NO: 10616 - RNA, 22 nt, synthetic construct
  source 1..22: mol_type = other RNA
ccaatcggcgacaagaggctag

SEQ ID NO: 10617 - RNA, 22 nt, synthetic construct
  source 1..22: mol_type = other RNA
ccaatggcgcggcgggaggggg

SEQ ID NO: 10618 - RNA, 22 nt, synthetic construct
  source 1..22: mol_type = other RNA
ccaatgggtgcggggcggtggg

SEQ ID NO: 10619 - RNA, 22 nt, synthetic construct
  source 1..22: mol_type = other RNA
ccacacgttctctggctccccg

SEQ ID NO: 10620 - RNA, 22 nt, synthetic construct
  source 1..22: mol_type = other RNA
ccacagcgtgtctgagatagcc

SEQ ID NO: 10621 - RNA, 22 nt, synthetic construct
  source 1..22: mol_type = other RNA
ccacagcttcgacagccaatca

SEQ ID NO: 10622 - RNA, 22 nt, synthetic construct
  source 1..22: mol_type = other RNA
ccaccacacgttctctggctcc

SEQ ID NO: 10623 - RNA, 22 nt, synthetic construct
  source 1..22: mol_type = other RNA
ccaccagacggcccccctagcc

SEQ ID NO: 10624 - RNA, 22 nt, synthetic construct
  source 1..22: mol_type = other RNA
ccaccagagttccgctccccta

SEQ ID NO: 10625 - RNA, 22 nt, synthetic construct
  source 1..22: mol_type = other RNA
ccacccagggggcaacgcgaga

SEQ ID NO: 10626 - RNA, 22 nt, synthetic construct
  source 1..22: mol_type = other RNA
ccacccatccccccagtgtacc

SEQ ID NO: 10627 - RNA, 22 nt, synthetic construct
  source 1..22: mol_type = other RNA
ccacccccaccacacgttctct

SEQ ID NO: 10628 - RNA, 22 nt, synthetic construct
  source 1..22: mol_type = other RNA
ccacccccacctcacgggtacg

SEQ ID NO: 10629 - RNA, 22 nt, synthetic construct
  source 1..22: mol_type = other RNA
ccacccccacgagtgcctgtag

SEQ ID NO: 10630 - RNA, 22 nt, synthetic construct
  source 1..22: mol_type = other RNA
ccacccccgcgccccgcgcagt

SEQ ID NO: 10631 - RNA, 22 nt, synthetic construct
  source 1..22: mol_type = other RNA
ccacccctttccctcccaacgt

SEQ ID NO: 10632 - RNA, 22 nt, synthetic construct
  source 1..22: mol_type = other RNA
ccaccctccccttccttcgggg

SEQ ID NO: 10633 - RNA, 22 nt, synthetic construct
  source 1..22: mol_type = other RNA
ccaccgccccgcacccattggc

SEQ ID NO: 10634 - RNA, 22 nt, synthetic construct
  source 1..22: mol_type = other RNA
ccaccgcctgaagggcgagaca

SEQ ID NO: 10635 - RNA, 22 nt, synthetic construct
  source 1..22: mol_type = other RNA
ccacctacctacccgccccacc

SEQ ID NO: 10636 - RNA, 22 nt, synthetic construct
  source 1..22: mol_type = other RNA
ccacctcacgggtacgggccat

SEQ ID NO: 10637 - RNA, 22 nt, synthetic construct
  source 1..22: mol_type = other RNA
ccacctcagatggctgcttccc

SEQ ID NO: 10638 - RNA, 22 nt, synthetic construct
  source 1..22: mol_type = other RNA
ccacgacccaaggagagcgagc

SEQ ID NO: 10639 - RNA, 22 nt, synthetic construct
  source 1..22: mol_type = other RNA
ccacgagtgcctgtagcaggtc

SEQ ID NO: 10640 - RNA, 22 nt, synthetic construct
  source 1..22: mol_type = other RNA
ccacgcccaaggcaagtaaaac

SEQ ID NO: 10641 - RNA, 22 nt, synthetic construct
  source 1..22: mol_type = other RNA
ccacggcgtttcctggccggga

SEQ ID NO: 10642 - RNA, 22 nt, synthetic construct
  source 1..22: mol_type = other RNA
ccacgggaaaggcaacccccgc

SEQ ID NO: 10643 - RNA, 22 nt, synthetic construct
  source 1..22: mol_type = other RNA
ccacggggagccagagaacgtg

SEQ ID NO: 10644 - RNA, 22 nt, synthetic construct
  source 1..22: mol_type = other RNA
ccacgttgcgcaggggcgcggg

SEQ ID NO: 10645 - RNA, 22 nt, synthetic construct
  source 1..22: mol_type = other RNA
ccacgtttacctttcccttgag

SEQ ID NO: 10646 - RNA, 22 nt, synthetic construct
  source 1..22: mol_type = other RNA
ccactccctacccccgttctcg

SEQ ID NO: 10647 - RNA, 22 nt, synthetic construct
  source 1..22: mol_type = other RNA
ccactcgccgccaatcagcgga

SEQ ID NO: 10648 - RNA, 22 nt, synthetic construct
  source 1..22: mol_type = other RNA
ccactgaccgcacggggattcc

SEQ ID NO: 10649 - RNA, 22 nt, synthetic construct
  source 1..22: mol_type = other RNA
ccactgacgcccaagaagtgag

SEQ ID NO: 10650 - RNA, 22 nt, synthetic construct
  source 1..22: mol_type = other RNA
ccacttctcacccccctcgccg

SEQ ID NO: 10651 - RNA, 22 nt, synthetic construct
  source 1..22: mol_type = other RNA
ccagaaaacgagagggaaggcg

SEQ ID NO: 10652 - RNA, 22 nt, synthetic construct
  source 1..22: mol_type = other RNA
ccagaagtctcggccggcagcc

SEQ ID NO: 10653 - RNA, 22 nt, synthetic construct
  source 1..22: mol_type = other RNA
ccagaatacgccatttgtgttt

SEQ ID NO: 10654 - RNA, 22 nt, synthetic construct
  source 1..22: mol_type = other RNA
ccagacactgcggcgctcggcc

SEQ ID NO: 10655 - RNA, 22 nt, synthetic construct
  source 1..22: mol_type = other RNA
ccagacggcccccctagccacc

SEQ ID NO: 10656 - RNA, 22 nt, synthetic construct
  source 1..22: mol_type = other RNA
ccagagaacgtgtggtgggggt

SEQ ID NO: 10657 - RNA, 22 nt, synthetic construct
  source 1..22: mol_type = other RNA
ccagagccgatttcactgaccc

SEQ ID NO: 10658 - RNA, 22 nt, synthetic construct
  source 1..22: mol_type = other RNA
ccagagcgatcagagttgtctg

SEQ ID NO: 10659 - RNA, 22 nt, synthetic construct
  source 1..22: mol_type = other RNA
ccagagttccgctcccctacct

SEQ ID NO: 10660 - RNA, 22 nt, synthetic construct
  source 1..22: mol_type = other RNA
ccagattgtgtcgttttacttg

SEQ ID NO: 10661 - RNA, 22 nt, synthetic construct
  source 1..22: mol_type = other RNA
ccagcatctctacaccccacct

SEQ ID NO: 10662 - RNA, 22 nt, synthetic construct
  source 1..22: mol_type = other RNA
ccagccacccctttccctccca

SEQ ID NO: 10663 - RNA, 22 nt, synthetic construct
  source 1..22: mol_type = other RNA
ccagccggaccgacccccgctc

SEQ ID NO: 10664 - RNA, 22 nt, synthetic construct
  source 1..22: mol_type = other RNA
ccagcgcgcgcttcctgccacg

SEQ ID NO: 10665 - RNA, 22 nt, synthetic construct
  source 1..22: mol_type = other RNA
ccaggaaaaacatgaaaggggg

SEQ ID NO: 10666 - RNA, 22 nt, synthetic construct
  source 1..22: mol_type = other RNA
ccaggaaacgccgtggcgccgc

SEQ ID NO: 10667 - RNA, 22 nt, synthetic construct
  source 1..22: mol_type = other RNA
ccaggaaagggggtgaagaggc

SEQ ID NO: 10668 - RNA, 22 nt, synthetic construct
  source 1..22: mol_type = other RNA
ccaggaagattacggaggggag

SEQ ID NO: 10669 - RNA, 22 nt, synthetic construct
  source 1..22: mol_type = other RNA
ccaggcccacgacccaaggaga

SEQ ID NO: 10670 - RNA, 22 nt, synthetic construct
  source 1..22: mol_type = other RNA
ccaggccccggcagcgcctggg

SEQ ID NO: 10671 - RNA, 22 nt, synthetic construct
  source 1..22: mol_type = other RNA
ccaggctcgaaccctacacatt

SEQ ID NO: 10672 - RNA, 22 nt, synthetic construct
  source 1..22: mol_type = other RNA
ccagggaaagaggggggccggc

SEQ ID NO: 10673 - RNA, 22 nt, synthetic construct
  source 1..22: mol_type = other RNA
ccagggagagagatccccctct

SEQ ID NO: 10674 - RNA, 22 nt, synthetic construct
  source 1..22: mol_type = other RNA
ccagggctctttcctacactcc

SEQ ID NO: 10675 - RNA, 22 nt, synthetic construct
  source 1..22: mol_type = other RNA
ccaggggagggaagggtcacct

SEQ ID NO: 10676 - RNA, 22 nt, synthetic construct
  source 1..22: mol_type = other RNA
ccagggggcaacgcgagagtcg

SEQ ID NO: 10677 - RNA, 22 nt, synthetic construct
  source 1..22: mol_type = other RNA
ccagtagcaagggcccggtccc

SEQ ID NO: 10678 - RNA, 22 nt, synthetic construct
  source 1..22: mol_type = other RNA
ccagtcccgccagtccgccaac

SEQ ID NO: 10679 - RNA, 22 nt, synthetic construct
  source 1..22: mol_type = other RNA
ccagtccgccaacacagtagtg

SEQ ID NO: 10680 - RNA, 22 nt, synthetic construct
  source 1..22: mol_type = other RNA
ccagtgtaccgcacctcccctc

SEQ ID NO: 10681 - RNA, 22 nt, synthetic construct
  source 1..22: mol_type = other RNA
ccatatccaagagaaagaccac

SEQ ID NO: 10682 - RNA, 22 nt, synthetic construct
  source 1..22: mol_type = other RNA
ccatccagaagtctcggccggc

SEQ ID NO: 10683 - RNA, 22 nt, synthetic construct
  source 1..22: mol_type = other RNA
ccatccccccagtgtaccgcac

SEQ ID NO: 10684 - RNA, 22 nt, synthetic construct
  source 1..22: mol_type = other RNA
ccatctgaggtgggaagccaga

SEQ ID NO: 10685 - RNA, 22 nt, synthetic construct
  source 1..22: mol_type = other RNA
ccattcccggccaggaaacgcc

SEQ ID NO: 10686 - RNA, 22 nt, synthetic construct
  source 1..22: mol_type = other RNA
ccattgctctcgcagagggagg

SEQ ID NO: 10687 - RNA, 22 nt, synthetic construct
  source 1..22: mol_type = other RNA
ccattggcccactcgccgccaa

SEQ ID NO: 10688 - RNA, 22 nt, synthetic construct
  source 1..22: mol_type = other RNA
ccattggcctctccgcccaccg

SEQ ID NO: 10689 - RNA, 22 nt, synthetic construct
  source 1..22: mol_type = other RNA
ccatttgtgttttcacacacgg

SEQ ID NO: 10690 - RNA, 22 nt, synthetic construct
  source 1..22: mol_type = other RNA
ccattttcccagggagagagat

SEQ ID NO: 10691 - RNA, 22 nt, synthetic construct
  source 1..22: mol_type = other RNA
cccaaaggcattaccttcgcca

SEQ ID NO: 10692 - RNA, 22 nt, synthetic construct
  source 1..22: mol_type = other RNA
cccaacagtttaactttccctc

SEQ ID NO: 10693 - RNA, 22 nt, synthetic construct
  source 1..22: mol_type = other RNA
cccaacgcctcttcaccccctt

SEQ ID NO: 10694 - RNA, 22 nt, synthetic construct
  source 1..22: mol_type = other RNA
cccaacgcggcgccacggcgtt

SEQ ID NO: 10695 - RNA, 22 nt, synthetic construct
  source 1..22: mol_type = other RNA
cccaacgtaacaaacattatgt

SEQ ID NO: 10696 - RNA, 22 nt, synthetic construct
  source 1..22: mol_type = other RNA
cccaactccccctttcatgttt

SEQ ID NO: 10697 - RNA, 22 nt, synthetic construct
  source 1..22: mol_type = other RNA
cccaagaagtgagacaagcaag

SEQ ID NO: 10698 - RNA, 22 nt, synthetic construct
  source 1..22: mol_type = other RNA
cccaagctcttaggaggatgct

SEQ ID NO: 10699 - RNA, 22 nt, synthetic construct
  source 1..22: mol_type = other RNA
cccaaggagagcgagcgcgggg

SEQ ID NO: 10700 - RNA, 22 nt, synthetic construct
  source 1..22: mol_type = other RNA
cccaaggcaagtaaaacgacac

SEQ ID NO: 10701 - RNA, 22 nt, synthetic construct
  source 1..22: mol_type = other RNA
cccacagcttcgacagccaatc

SEQ ID NO: 10702 - RNA, 22 nt, synthetic construct
  source 1..22: mol_type = other RNA
cccaccacacgttctctggctc

SEQ ID NO: 10703 - RNA, 22 nt, synthetic construct
  source 1..22: mol_type = other RNA
cccaccagagttccgctcccct

SEQ ID NO: 10704 - RNA, 22 nt, synthetic construct
  source 1..22: mol_type = other RNA
cccacccagggggcaacgcgag

SEQ ID NO: 10705 - RNA, 22 nt, synthetic construct
  source 1..22: mol_type = other RNA
cccacccccacctcacgggtac

SEQ ID NO: 10706 - RNA, 22 nt, synthetic construct
  source 1..22: mol_type = other RNA
cccacccccacgagtgcctgta

SEQ ID NO: 10707 - RNA, 22 nt, synthetic construct
  source 1..22: mol_type = other RNA
cccaccctccccttccttcggg

SEQ ID NO: 10708 - RNA, 22 nt, synthetic construct
  source 1..22: mol_type = other RNA
cccaccgccccgcacccattgg

SEQ ID NO: 10709 - RNA, 22 nt, synthetic construct
  source 1..22: mol_type = other RNA
cccaccgcctgaagggcgagac

SEQ ID NO: 10710 - RNA, 22 nt, synthetic construct
  source 1..22: mol_type = other RNA
cccacctacctacccgccccac

SEQ ID NO: 10711 - RNA, 22 nt, synthetic construct
  source 1..22: mol_type = other RNA
cccacctcacgggtacgggcca

SEQ ID NO: 10712 - RNA, 22 nt, synthetic construct
  source 1..22: mol_type = other RNA
cccacctcagatggctgcttcc

SEQ ID NO: 10713 - RNA, 22 nt, synthetic construct
  source 1..22: mol_type = other RNA
cccacgacccaaggagagcgag

SEQ ID NO: 10714 - RNA, 22 nt, synthetic construct
  source 1..22: mol_type = other RNA
cccacgagtgcctgtagcaggt

SEQ ID NO: 10715 - RNA, 22 nt, synthetic construct
  source 1..22: mol_type = other RNA
cccacgggaaaggcaacccccg

SEQ ID NO: 10716 - RNA, 22 nt, synthetic construct
  source 1..22: mol_type = other RNA
cccactccctacccccgttctc

SEQ ID NO: 10717 - RNA, 22 nt, synthetic construct
  source 1..22: mol_type = other RNA
cccactcgccgccaatcagcgg

SEQ ID NO: 10718 - RNA, 22 nt, synthetic construct
  source 1..22: mol_type = other RNA
cccagagcgatcagagttgtct

SEQ ID NO: 10719 - RNA, 22 nt, synthetic construct
  source 1..22: mol_type = other RNA
cccagcatctctacaccccacc

SEQ ID NO: 10720 - RNA, 22 nt, synthetic construct
  source 1..22: mol_type = other RNA
cccaggaaaaacatgaaagggg

SEQ ID NO: 10721 - RNA, 22 nt, synthetic construct
  source 1..22: mol_type = other RNA
cccaggaaagggggtgaagagg

SEQ ID NO: 10722 - RNA, 22 nt, synthetic construct
  source 1..22: mol_type = other RNA
cccaggccccggcagcgcctgg

SEQ ID NO: 10723 - RNA, 22 nt, synthetic construct
  source 1..22: mol_type = other RNA
cccagggagagagatccccctc

SEQ ID NO: 10724 - RNA, 22 nt, synthetic construct
  source 1..22: mol_type = other RNA
cccaggggagggaagggtcacc

SEQ ID NO: 10725 - RNA, 22 nt, synthetic construct
  source 1..22: mol_type = other RNA
cccagggggcaacgcgagagtc

SEQ ID NO: 10726 - RNA, 22 nt, synthetic construct
  source 1..22: mol_type = other RNA
cccagtcccgccagtccgccaa

SEQ ID NO: 10727 - RNA, 22 nt, synthetic construct
  source 1..22: mol_type = other RNA
cccagtgtaccgcacctcccct

SEQ ID NO: 10728 - RNA, 22 nt, synthetic construct
  source 1..22: mol_type = other RNA
cccatccccccagtgtaccgca

SEQ ID NO: 10729 - RNA, 22 nt, synthetic construct
  source 1..22: mol_type = other RNA
cccattggcccactcgccgcca

SEQ ID NO: 10730 - RNA, 22 nt, synthetic construct
  source 1..22: mol_type = other RNA
cccattttcccagggagagaga

SEQ ID NO: 10731 - RNA, 22 nt, synthetic construct
  source 1..22: mol_type = other RNA
ccccaacgcctcttcaccccct

SEQ ID NO: 10732 - RNA, 22 nt, synthetic construct
  source 1..22: mol_type = other RNA
ccccaagctcttaggaggatgc

SEQ ID NO: 10733 - RNA, 22 nt, synthetic construct
  source 1..22: mol_type = other RNA
ccccaccacacgttctctggct

SEQ ID NO: 10734 - RNA, 22 nt, synthetic construct
  source 1..22: mol_type = other RNA
ccccacccagggggcaacgcga

SEQ ID NO: 10735 - RNA, 22 nt, synthetic construct
  source 1..22: mol_type = other RNA
ccccacccccacctcacgggta

SEQ ID NO: 10736 - RNA, 22 nt, synthetic construct
  source 1..22: mol_type = other RNA
ccccacccccacgagtgcctgt

SEQ ID NO: 10737 - RNA, 22 nt, synthetic construct
  source 1..22: mol_type = other RNA
ccccacctacctacccgcccca

SEQ ID NO: 10738 - RNA, 22 nt, synthetic construct
  source 1..22: mol_type = other RNA
ccccacctcacgggtacgggcc

SEQ ID NO: 10739 - RNA, 22 nt, synthetic construct
  source 1..22: mol_type = other RNA
ccccacgagtgcctgtagcagg

SEQ ID NO: 10740 - RNA, 22 nt, synthetic construct
  source 1..22: mol_type = other RNA
ccccactccctacccccgttct

SEQ ID NO: 10741 - RNA, 22 nt, synthetic construct
  source 1..22: mol_type = other RNA
ccccagagcgatcagagttgtc

SEQ ID NO: 10742 - RNA, 22 nt, synthetic construct
  source 1..22: mol_type = other RNA
ccccaggggagggaagggtcac

SEQ ID NO: 10743 - RNA, 22 nt, synthetic construct
  source 1..22: mol_type = other RNA
ccccagtcccgccagtccgcca

SEQ ID NO: 10744 - RNA, 22 nt, synthetic construct
  source 1..22: mol_type = other RNA
ccccagtgtaccgcacctcccc

SEQ ID NO: 10745 - RNA, 22 nt, synthetic construct
  source 1..22: mol_type = other RNA
ccccattttcccagggagagag

SEQ ID NO: 10746 - RNA, 22 nt, synthetic construct
  source 1..22: mol_type = other RNA
cccccaacgcctcttcaccccc

SEQ ID NO: 10747 - RNA, 22 nt, synthetic construct
  source 1..22: mol_type = other RNA
cccccaccacacgttctctggc

SEQ ID NO: 10748 - RNA, 22 nt, synthetic construct
  source 1..22: mol_type = other RNA
cccccacccccacctcacgggt

SEQ ID NO: 10749 - RNA, 22 nt, synthetic construct
  source 1..22: mol_type = other RNA
cccccacccccacgagtgcctg

SEQ ID NO: 10750 - RNA, 22 nt, synthetic construct
  source 1..22: mol_type = other RNA
cccccacctcacgggtacgggc

SEQ ID NO: 10751 - RNA, 22 nt, synthetic construct
  source 1..22: mol_type = other RNA
cccccacgagtgcctgtagcag

SEQ ID NO: 10752 - RNA, 22 nt, synthetic construct
  source 1..22: mol_type = other RNA
cccccactccctacccccgttc

SEQ ID NO: 10753 - RNA, 22 nt, synthetic construct
  source 1..22: mol_type = other RNA
cccccagagcgatcagagttgt

SEQ ID NO: 10754 - RNA, 22 nt, synthetic construct
  source 1..22: mol_type = other RNA
cccccagtgtaccgcacctccc

SEQ ID NO: 10755 - RNA, 22 nt, synthetic construct
  source 1..22: mol_type = other RNA
ccccccacccccacctcacggg

SEQ ID NO: 10756 - RNA, 22 nt, synthetic construct
  source 1..22: mol_type = other RNA
ccccccagtgtaccgcacctcc

SEQ ID NO: 10757 - RNA, 22 nt, synthetic construct
  source 1..22: mol_type = other RNA
cccccctagccacccatccccc

SEQ ID NO: 10758 - RNA, 22 nt, synthetic construct
  source 1..22: mol_type = other RNA
cccccctccccgcctttggctc

SEQ ID NO: 10759 - RNA, 22 nt, synthetic construct
  source 1..22: mol_type = other RNA
cccccctcgccgccttgcacac

SEQ ID NO: 10760 - RNA, 22 nt, synthetic construct
  source 1..22: mol_type = other RNA
cccccgaaggaaggggagggtg

SEQ ID NO: 10761 - RNA, 22 nt, synthetic construct
  source 1..22: mol_type = other RNA
cccccgcaagccaccagacggc

SEQ ID NO: 10762 - RNA, 22 nt, synthetic construct
  source 1..22: mol_type = other RNA
cccccgcctccagcgcgcgctt

SEQ ID NO: 10763 - RNA, 22 nt, synthetic construct
  source 1..22: mol_type = other RNA
cccccgcgccccgcgcagtggt

SEQ ID NO: 10764 - RNA, 22 nt, synthetic construct
  source 1..22: mol_type = other RNA
cccccgctcctcccccaccccc

SEQ ID NO: 10765 - RNA, 22 nt, synthetic construct
  source 1..22: mol_type = other RNA
cccccgttctcgcggccttgtg

SEQ ID NO: 10766 - RNA, 22 nt, synthetic construct
  source 1..22: mol_type = other RNA
ccccctagccacccatcccccc

SEQ ID NO: 10767 - RNA, 22 nt, synthetic construct
  source 1..22: mol_type = other RNA
ccccctccccgcctttggctcg

SEQ ID NO: 10768 - RNA, 22 nt, synthetic construct
  source 1..22: mol_type = other RNA
ccccctcccgccgcgccattgg

SEQ ID NO: 10769 - RNA, 22 nt, synthetic construct
  source 1..22: mol_type = other RNA
ccccctcgccgccttgcacaca

SEQ ID NO: 10770 - RNA, 22 nt, synthetic construct
  source 1..22: mol_type = other RNA
ccccctctaatctaggcgaccc

SEQ ID NO: 10771 - RNA, 22 nt, synthetic construct
  source 1..22: mol_type = other RNA
ccccctgggtggggcgggtagg

SEQ ID NO: 10772 - RNA, 22 nt, synthetic construct
  source 1..22: mol_type = other RNA
ccccctttcatgtttttcctgg

SEQ ID NO: 10773 - RNA, 22 nt, synthetic construct
  source 1..22: mol_type = other RNA
ccccctttcctgggaactgcct

SEQ ID NO: 10774 - RNA, 22 nt, synthetic construct
  source 1..22: mol_type = other RNA
ccccgaaggaaggggagggtgg

SEQ ID NO: 10775 - RNA, 22 nt, synthetic construct
  source 1..22: mol_type = other RNA
ccccgaggccgagcgccgcagt

SEQ ID NO: 10776 - RNA, 22 nt, synthetic construct
  source 1..22: mol_type = other RNA
ccccgatcccccactccctacc

SEQ ID NO: 10777 - RNA, 22 nt, synthetic construct
  source 1..22: mol_type = other RNA
ccccgcaagccaccagacggcc

SEQ ID NO: 10778 - RNA, 22 nt, synthetic construct
  source 1..22: mol_type = other RNA
ccccgcacccattggcccactc

SEQ ID NO: 10779 - RNA, 22 nt, synthetic construct
  source 1..22: mol_type = other RNA
ccccgcctccagcgcgcgcttc

SEQ ID NO: 10780 - RNA, 22 nt, synthetic construct
  source 1..22: mol_type = other RNA
ccccgcctttggctcgctccgc

SEQ ID NO: 10781 - RNA, 22 nt, synthetic construct
  source 1..22: mol_type = other RNA
ccccgcgcagtggtttcgctca

SEQ ID NO: 10782 - RNA, 22 nt, synthetic construct
  source 1..22: mol_type = other RNA
ccccgcgccccgcgcagtggtt

SEQ ID NO: 10783 - RNA, 22 nt, synthetic construct
  source 1..22: mol_type = other RNA
ccccgcgcccctgcgcaacgtg

SEQ ID NO: 10784 - RNA, 22 nt, synthetic construct
  source 1..22: mol_type = other RNA
ccccgcgctcgctctccttggg

SEQ ID NO: 10785 - RNA, 22 nt, synthetic construct
  source 1..22: mol_type = other RNA
ccccgctcctcccccaccccca

SEQ ID NO: 10786 - RNA, 22 nt, synthetic construct
  source 1..22: mol_type = other RNA
ccccggcagcgcctgggacaag

SEQ ID NO: 10787 - RNA, 22 nt, synthetic construct
  source 1..22: mol_type = other RNA
ccccggcggcttccgctgattg

SEQ ID NO: 10788 - RNA, 22 nt, synthetic construct
  source 1..22: mol_type = other RNA
ccccgggttcccaccgcctgaa

SEQ ID NO: 10789 - RNA, 22 nt, synthetic construct
  source 1..22: mol_type = other RNA
ccccgtgcggtcagtggcgttt

SEQ ID NO: 10790 - RNA, 22 nt, synthetic construct
  source 1..22: mol_type = other RNA
ccccgtggcgtgtgccacagcg

SEQ ID NO: 10791 - RNA, 22 nt, synthetic construct
  source 1..22: mol_type = other RNA
ccccgttctcgcggccttgtga

SEQ ID NO: 10792 - RNA, 22 nt, synthetic construct
  source 1..22: mol_type = other RNA
cccctacctagccgaggctctc

SEQ ID NO: 10793 - RNA, 22 nt, synthetic construct
  source 1..22: mol_type = other RNA
cccctagccacccatcccccca

SEQ ID NO: 10794 - RNA, 22 nt, synthetic construct
  source 1..22: mol_type = other RNA
cccctcccaccagagttccgct

SEQ ID NO: 10795 - RNA, 22 nt, synthetic construct
  source 1..22: mol_type = other RNA
cccctcccccaacgcctcttca

SEQ ID NO: 10796 - RNA, 22 nt, synthetic construct
  source 1..22: mol_type = other RNA
cccctccccgcctttggctcgc

SEQ ID NO: 10797 - RNA, 22 nt, synthetic construct
  source 1..22: mol_type = other RNA
cccctcccgccgcgccattggc

SEQ ID NO: 10798 - RNA, 22 nt, synthetic construct
  source 1..22: mol_type = other RNA
cccctccgtaatcttcctggac

SEQ ID NO: 10799 - RNA, 22 nt, synthetic construct
  source 1..22: mol_type = other RNA
cccctcgccgccttgcacacac

SEQ ID NO: 10800 - RNA, 22 nt, synthetic construct
  source 1..22: mol_type = other RNA
cccctctaatctaggcgaccca

SEQ ID NO: 10801 - RNA, 22 nt, synthetic construct
  source 1..22: mol_type = other RNA
cccctgcgcaacgtggcaggaa

SEQ ID NO: 10802 - RNA, 22 nt, synthetic construct
  source 1..22: mol_type = other RNA
cccctggcgccggcgctgggaa

SEQ ID NO: 10803 - RNA, 22 nt, synthetic construct
  source 1..22: mol_type = other RNA
cccctggggcccgatcgtgagg

SEQ ID NO: 10804 - RNA, 22 nt, synthetic construct
  source 1..22: mol_type = other RNA
cccctgggtggggcgggtaggt

SEQ ID NO: 10805 - RNA, 22 nt, synthetic construct
  source 1..22: mol_type = other RNA
ccccttccttcgggggagtcgg

SEQ ID NO: 10806 - RNA, 22 nt, synthetic construct
  source 1..22: mol_type = other RNA
ccccttctatgctaattgattc

SEQ ID NO: 10807 - RNA, 22 nt, synthetic construct
  source 1..22: mol_type = other RNA
cccctttcatgtttttcctggg

SEQ ID NO: 10808 - RNA, 22 nt, synthetic construct
  source 1..22: mol_type = other RNA
cccctttccctcccaacgtaac

SEQ ID NO: 10809 - RNA, 22 nt, synthetic construct
  source 1..22: mol_type = other RNA
cccctttcctgggaactgccta

SEQ ID NO: 10810 - RNA, 22 nt, synthetic construct
  source 1..22: mol_type = other RNA
cccgaaggaaggggagggtggg

SEQ ID NO: 10811 - RNA, 22 nt, synthetic construct
  source 1..22: mol_type = other RNA
cccgacctgctacaggcactcg

SEQ ID NO: 10812 - RNA, 22 nt, synthetic construct
  source 1..22: mol_type = other RNA
cccgacggcgtaactgacagga

SEQ ID NO: 10813 - RNA, 22 nt, synthetic construct
  source 1..22: mol_type = other RNA
cccgacttacacgcagagggaa

SEQ ID NO: 10814 - RNA, 22 nt, synthetic construct
  source 1..22: mol_type = other RNA
cccgacttcccacgggaaaggc

SEQ ID NO: 10815 - RNA, 22 nt, synthetic construct
  source 1..22: mol_type = other RNA
cccgagcggaaacgccactgac

SEQ ID NO: 10816 - RNA, 22 nt, synthetic construct
  source 1..22: mol_type = other RNA
cccgaggccgagcgccgcagtg

SEQ ID NO: 10817 - RNA, 22 nt, synthetic construct
  source 1..22: mol_type = other RNA
cccgatcccccactccctaccc

SEQ ID NO: 10818 - RNA, 22 nt, synthetic construct
  source 1..22: mol_type = other RNA
cccgatcgtgaggttcggtctc

SEQ ID NO: 10819 - RNA, 22 nt, synthetic construct
  source 1..22: mol_type = other RNA
cccgcaagccaccagacggccc

SEQ ID NO: 10820 - RNA, 22 nt, synthetic construct
  source 1..22: mol_type = other RNA
cccgcacacccagcatctctac

SEQ ID NO: 10821 - RNA, 22 nt, synthetic construct
  source 1..22: mol_type = other RNA
cccgcacccattggcccactcg

SEQ ID NO: 10822 - RNA, 22 nt, synthetic construct
  source 1..22: mol_type = other RNA
cccgccagtccgccaacacagt

SEQ ID NO: 10823 - RNA, 22 nt, synthetic construct
  source 1..22: mol_type = other RNA
cccgccccacccagggggcaac

SEQ ID NO: 10824 - RNA, 22 nt, synthetic construct
  source 1..22: mol_type = other RNA
cccgccctgcggcaaccggagg

SEQ ID NO: 10825 - RNA, 22 nt, synthetic construct
  source 1..22: mol_type = other RNA
cccgccgcctgcttgtcttcga

SEQ ID NO: 10826 - RNA, 22 nt, synthetic construct
  source 1..22: mol_type = other RNA
cccgccgcgccattggcctctc

SEQ ID NO: 10827 - RNA, 22 nt, synthetic construct
  source 1..22: mol_type = other RNA
cccgccgtgtgtgaaaacacaa

SEQ ID NO: 10828 - RNA, 22 nt, synthetic construct
  source 1..22: mol_type = other RNA
cccgcctccagcgcgcgcttcc

SEQ ID NO: 10829 - RNA, 22 nt, synthetic construct
  source 1..22: mol_type = other RNA
cccgcctgcatccagccacccc

SEQ ID NO: 10830 - RNA, 22 nt, synthetic construct
  source 1..22: mol_type = other RNA
cccgcctgcgctcagagactca

SEQ ID NO: 10831 - RNA, 22 nt, synthetic construct
  source 1..22: mol_type = other RNA
cccgcctttggctcgctccgcc

SEQ ID NO: 10832 - RNA, 22 nt, synthetic construct
  source 1..22: mol_type = other RNA
cccgcgcagtggtttcgctcat

SEQ ID NO: 10833 - RNA, 22 nt, synthetic construct
  source 1..22: mol_type = other RNA
cccgcgccagagccgatttcac

SEQ ID NO: 10834 - RNA, 22 nt, synthetic construct
  source 1..22: mol_type = other RNA
cccgcgccccgcgcagtggttt

SEQ ID NO: 10835 - RNA, 22 nt, synthetic construct
  source 1..22: mol_type = other RNA
cccgcgcccctgcgcaacgtgg

SEQ ID NO: 10836 - RNA, 22 nt, synthetic construct
  source 1..22: mol_type = other RNA
cccgcgctcgctctccttgggt

SEQ ID NO: 10837 - RNA, 22 nt, synthetic construct
  source 1..22: mol_type = other RNA
cccgctcctcccccacccccac

SEQ ID NO: 10838 - RNA, 22 nt, synthetic construct
  source 1..22: mol_type = other RNA
cccgctgcccgagcggaaacgc

SEQ ID NO: 10839 - RNA, 22 nt, synthetic construct
  source 1..22: mol_type = other RNA
cccggcagcgcctgggacaagg

SEQ ID NO: 10840 - RNA, 22 nt, synthetic construct
  source 1..22: mol_type = other RNA
cccggccaggaaacgccgtggc

SEQ ID NO: 10841 - RNA, 22 nt, synthetic construct
  source 1..22: mol_type = other RNA
cccggcggcttccgctgattgg

SEQ ID NO: 10842 - RNA, 22 nt, synthetic construct
  source 1..22: mol_type = other RNA
cccgggaggcggcaggactcga

SEQ ID NO: 10843 - RNA, 22 nt, synthetic construct
  source 1..22: mol_type = other RNA
cccgggttcccaccgcctgaag

SEQ ID NO: 10844 - RNA, 22 nt, synthetic construct
  source 1..22: mol_type = other RNA
cccggtcccacagcttcgacag

SEQ ID NO: 10845 - RNA, 22 nt, synthetic construct
  source 1..22: mol_type = other RNA
cccgtacccgtgaggtgggggt

SEQ ID NO: 10846 - RNA, 22 nt, synthetic construct
  source 1..22: mol_type = other RNA
cccgtgaggtgggggtgggggg

SEQ ID NO: 10847 - RNA, 22 nt, synthetic construct
  source 1..22: mol_type = other RNA
cccgtgcggtcagtggcgtttc

SEQ ID NO: 10848 - RNA, 22 nt, synthetic construct
  source 1..22: mol_type = other RNA
cccgtggcgtgtgccacagcgt

SEQ ID NO: 10849 - RNA, 22 nt, synthetic construct
  source 1..22: mol_type = other RNA
cccgtgggaagtcgggaacata

SEQ ID NO: 10850 - RNA, 22 nt, synthetic construct
  source 1..22: mol_type = other RNA
cccgttctcgcggccttgtgac

SEQ ID NO: 10851 - RNA, 22 nt, synthetic construct
  source 1..22: mol_type = other RNA
ccctacacattcaacgaggcta

SEQ ID NO: 10852 - RNA, 22 nt, synthetic construct
  source 1..22: mol_type = other RNA
ccctacccccgttctcgcggcc

SEQ ID NO: 10853 - RNA, 22 nt, synthetic construct
  source 1..22: mol_type = other RNA
ccctacctagccgaggctctct

SEQ ID NO: 10854 - RNA, 22 nt, synthetic construct
  source 1..22: mol_type = other RNA
ccctagccacccatccccccag

SEQ ID NO: 10855 - RNA, 22 nt, synthetic construct
  source 1..22: mol_type = other RNA
ccctcccaacgtaacaaacatt

SEQ ID NO: 10856 - RNA, 22 nt, synthetic construct
  source 1..22: mol_type = other RNA
ccctcccaccagagttccgctc

SEQ ID NO: 10857 - RNA, 22 nt, synthetic construct
  source 1..22: mol_type = other RNA
ccctccccaagctcttaggagg

SEQ ID NO: 10858 - RNA, 22 nt, synthetic construct
  source 1..22: mol_type = other RNA
ccctcccccaacgcctcttcac

SEQ ID NO: 10859 - RNA, 22 nt, synthetic construct
  source 1..22: mol_type = other RNA
ccctccccgcctttggctcgct

SEQ ID NO: 10860 - RNA, 22 nt, synthetic construct
  source 1..22: mol_type = other RNA
ccctcccctggggcccgatcgt

SEQ ID NO: 10861 - RNA, 22 nt, synthetic construct
  source 1..22: mol_type = other RNA
ccctccccttccttcgggggag

SEQ ID NO: 10862 - RNA, 22 nt, synthetic construct
  source 1..22: mol_type = other RNA
ccctcccgccgcgccattggcc

SEQ ID NO: 10863 - RNA, 22 nt, synthetic construct
  source 1..22: mol_type = other RNA
ccctcccgcctgcatccagcca

SEQ ID NO: 10864 - RNA, 22 nt, synthetic construct
  source 1..22: mol_type = other RNA
ccctccgctcgaaatacacagg

SEQ ID NO: 10865 - RNA, 22 nt, synthetic construct
  source 1..22: mol_type = other RNA
ccctccggttgccgcagggcgg

SEQ ID NO: 10866 - RNA, 22 nt, synthetic construct
  source 1..22: mol_type = other RNA
ccctccgtaatcttcctggacg

SEQ ID NO: 10867 - RNA, 22 nt, synthetic construct
  source 1..22: mol_type = other RNA
ccctcgccgccttgcacacacc

SEQ ID NO: 10868 - RNA, 22 nt, synthetic construct
  source 1..22: mol_type = other RNA
ccctctaatctaggcgacccaa

SEQ ID NO: 10869 - RNA, 22 nt, synthetic construct
  source 1..22: mol_type = other RNA
ccctctcatgcgatttacctac

SEQ ID NO: 10870 - RNA, 22 nt, synthetic construct
  source 1..22: mol_type = other RNA
ccctctcgttttctggcttccc

SEQ ID NO: 10871 - RNA, 22 nt, synthetic construct
  source 1..22: mol_type = other RNA
ccctctgcgagagcaatggctc

SEQ ID NO: 10872 - RNA, 22 nt, synthetic construct
  source 1..22: mol_type = other RNA
ccctctgcgtgtaagtcgggaa

SEQ ID NO: 10873 - RNA, 22 nt, synthetic construct
  source 1..22: mol_type = other RNA
ccctgcgcaacgtggcaggaag

SEQ ID NO: 10874 - RNA, 22 nt, synthetic construct
  source 1..22: mol_type = other RNA
ccctgcggcaaccggaggggga

SEQ ID NO: 10875 - RNA, 22 nt, synthetic construct
  source 1..22: mol_type = other RNA
ccctggcgccggcgctgggaat

SEQ ID NO: 10876 - RNA, 22 nt, synthetic construct
  source 1..22: mol_type = other RNA
ccctgggaaaatggggtgttgc

SEQ ID NO: 10877 - RNA, 22 nt, synthetic construct
  source 1..22: mol_type = other RNA
ccctggggcccgatcgtgaggt

SEQ ID NO: 10878 - RNA, 22 nt, synthetic construct
  source 1..22: mol_type = other RNA
ccctgggtggggcgggtaggta

SEQ ID NO: 10879 - RNA, 22 nt, synthetic construct
  source 1..22: mol_type = other RNA
ccctggttcaagtaggtaaatc

SEQ ID NO: 10880 - RNA, 22 nt, synthetic construct
  source 1..22: mol_type = other RNA
cccttaccttgtcccaggcgct

SEQ ID NO: 10881 - RNA, 22 nt, synthetic construct
  source 1..22: mol_type = other RNA
cccttcaggcggtgggaacccg

SEQ ID NO: 10882 - RNA, 22 nt, synthetic construct
  source 1..22: mol_type = other RNA
cccttccctcccctggggcccg

SEQ ID NO: 10883 - RNA, 22 nt, synthetic construct
  source 1..22: mol_type = other RNA
cccttccttcgggggagtcggt

SEQ ID NO: 10884 - RNA, 22 nt, synthetic construct
  source 1..22: mol_type = other RNA
cccttctatgctaattgattct

SEQ ID NO: 10885 - RNA, 22 nt, synthetic construct
  source 1..22: mol_type = other RNA
cccttctccctccccctccggt

SEQ ID NO: 10886 - RNA, 22 nt, synthetic construct
  source 1..22: mol_type = other RNA
cccttgaggagaggcctcttgc

SEQ ID NO: 10887 - RNA, 22 nt, synthetic construct
  source 1..22: mol_type = other RNA
cccttgctactggctcgagtct

SEQ ID NO: 10888 - RNA, 22 nt, synthetic construct
  source 1..22: mol_type = other RNA
ccctttatgaattctctttccc

SEQ ID NO: 10889 - RNA, 22 nt, synthetic construct
  source 1..22: mol_type = other RNA
ccctttcatgtttttcctgggt

SEQ ID NO: 10890 - RNA, 22 nt, synthetic construct
  source 1..22: mol_type = other RNA
ccctttccctcccaacgtaaca

SEQ ID NO: 10891 - RNA, 22 nt, synthetic construct
  source 1..22: mol_type = other RNA
ccctttcctgggaactgcctac

SEQ ID NO: 10892 - RNA, 22 nt, synthetic construct
  source 1..22: mol_type = other RNA
ccgaacctcacgatcgggcccc

SEQ ID NO: 10893 - RNA, 22 nt, synthetic construct
  source 1..22: mol_type = other RNA
ccgaagcacagcctcttctcta

SEQ ID NO: 10894 - RNA, 22 nt, synthetic construct
  source 1..22: mol_type = other RNA
ccgaaggaaggggagggtggga

SEQ ID NO: 10895 - RNA, 22 nt, synthetic construct
  source 1..22: mol_type = other RNA
ccgacagaaaagagaccgaacc

SEQ ID NO: 10896 - RNA, 22 nt, synthetic construct
  source 1..22: mol_type = other RNA
ccgacccccgctcctcccccac

SEQ ID NO: 10897 - RNA, 22 nt, synthetic construct
  source 1..22: mol_type = other RNA
ccgacctgctacaggcactcgt

SEQ ID NO: 10898 - RNA, 22 nt, synthetic construct
  source 1..22: mol_type = other RNA
ccgacggcgtaactgacaggag

SEQ ID NO: 10899 - RNA, 22 nt, synthetic construct
  source 1..22: mol_type = other RNA
ccgactcccccgaaggaagggg

SEQ ID NO: 10900 - RNA, 22 nt, synthetic construct
  source 1..22: mol_type = other RNA
ccgacttacacgcagagggaaa

SEQ ID NO: 10901 - RNA, 22 nt, synthetic construct
  source 1..22: mol_type = other RNA
ccgacttcccacgggaaaggca

SEQ ID NO: 10902 - RNA, 22 nt, synthetic construct
  source 1..22: mol_type = other RNA
ccgagacttctggatggcggcg

SEQ ID NO: 10903 - RNA, 22 nt, synthetic construct
  source 1..22: mol_type = other RNA
ccgagcggaaacgccactgacc

SEQ ID NO: 10904 - RNA, 22 nt, synthetic construct
  source 1..22: mol_type = other RNA
ccgaggccgagcgccgcagtgt

SEQ ID NO: 10905 - RNA, 22 nt, synthetic construct
  source 1..22: mol_type = other RNA
ccgaggctctctgaggagccgg

SEQ ID NO: 10906 - RNA, 22 nt, synthetic construct
  source 1..22: mol_type = other RNA
ccgatcccccactccctacccc

SEQ ID NO: 10907 - RNA, 22 nt, synthetic construct
  source 1..22: mol_type = other RNA
ccgatcgtgaggttcggtctct

SEQ ID NO: 10908 - RNA, 22 nt, synthetic construct
  source 1..22: mol_type = other RNA
ccgattggccgtttctcctccc

SEQ ID NO: 10909 - RNA, 22 nt, synthetic construct
  source 1..22: mol_type = other RNA
ccgatttcactgaccctcccct

SEQ ID NO: 10910 - RNA, 22 nt, synthetic construct
  source 1..22: mol_type = other RNA
ccgcaagccaccagacggcccc

SEQ ID NO: 10911 - RNA, 22 nt, synthetic construct
  source 1..22: mol_type = other RNA
ccgcacacccagcatctctaca

SEQ ID NO: 10912 - RNA, 22 nt, synthetic construct
  source 1..22: mol_type = other RNA
ccgcacccattggcccactcgc

SEQ ID NO: 10913 - RNA, 22 nt, synthetic construct
  source 1..22: mol_type = other RNA
ccgcacctcccctcccaccaga

SEQ ID NO: 10914 - RNA, 22 nt, synthetic construct
  source 1..22: mol_type = other RNA
ccgcacggggattcccagcgcc

SEQ ID NO: 10915 - RNA, 22 nt, synthetic construct
  source 1..22: mol_type = other RNA
ccgcagggcgggcctccctccc

SEQ ID NO: 10916 - RNA, 22 nt, synthetic construct
  source 1..22: mol_type = other RNA
ccgcagtgtctggccccgcgcc

SEQ ID NO: 10917 - RNA, 22 nt, synthetic construct
  source 1..22: mol_type = other RNA
ccgccaacacagtagtgccggc

SEQ ID NO: 10918 - RNA, 22 nt, synthetic construct
  source 1..22: mol_type = other RNA
ccgccaatcagcggaagccgcc

SEQ ID NO: 10919 - RNA, 22 nt, synthetic construct
  source 1..22: mol_type = other RNA
ccgccacccccgcgccccgcgc

SEQ ID NO: 10920 - RNA, 22 nt, synthetic construct
  source 1..22: mol_type = other RNA
ccgccagtccgccaacacagta

SEQ ID NO: 10921 - RNA, 22 nt, synthetic construct
  source 1..22: mol_type = other RNA
ccgccatccagaagtctcggcc

SEQ ID NO: 10922 - RNA, 22 nt, synthetic construct
  source 1..22: mol_type = other RNA
ccgcccaccgccccgcacccat

SEQ ID NO: 10923 - RNA, 22 nt, synthetic construct
  source 1..22: mol_type = other RNA
ccgccccacccagggggcaacg

SEQ ID NO: 10924 - RNA, 22 nt, synthetic construct
  source 1..22: mol_type = other RNA
ccgccccgcacccattggccca

SEQ ID NO: 10925 - RNA, 22 nt, synthetic construct
  source 1..22: mol_type = other RNA
ccgccccgggttcccaccgcct

SEQ ID NO: 10926 - RNA, 22 nt, synthetic construct
  source 1..22: mol_type = other RNA
ccgcccgcctgcgctcagagac

SEQ ID NO: 10927 - RNA, 22 nt, synthetic construct
  source 1..22: mol_type = other RNA
ccgccctgcggcaaccggaggg

SEQ ID NO: 10928 - RNA, 22 nt, synthetic construct
  source 1..22: mol_type = other RNA
ccgccgccatccagaagtctcg

SEQ ID NO: 10929 - RNA, 22 nt, synthetic construct
  source 1..22: mol_type = other RNA
ccgccgcccgcctgcgctcaga

SEQ ID NO: 10930 - RNA, 22 nt, synthetic construct
  source 1..22: mol_type = other RNA
ccgccgcctgcttgtcttcgac

SEQ ID NO: 10931 - RNA, 22 nt, synthetic construct
  source 1..22: mol_type = other RNA
ccgccgcgccattggcctctcc

SEQ ID NO: 10932 - RNA, 22 nt, synthetic construct
  source 1..22: mol_type = other RNA
ccgccggggccgcctagagaag

SEQ ID NO: 10933 - RNA, 22 nt, synthetic construct
  source 1..22: mol_type = other RNA
ccgccgtgtgtgaaaacacaaa

SEQ ID NO: 10934 - RNA, 22 nt, synthetic construct
  source 1..22: mol_type = other RNA
ccgcctagagaagaggctgtgc

SEQ ID NO: 10935 - RNA, 22 nt, synthetic construct
  source 1..22: mol_type = other RNA
ccgcctccagcgcgcgcttcct

SEQ ID NO: 10936 - RNA, 22 nt, synthetic construct
  source 1..22: mol_type = other RNA
ccgcctgaagggcgagacaagc

SEQ ID NO: 10937 - RNA, 22 nt, synthetic construct
  source 1..22: mol_type = other RNA
ccgcctgcatccagccacccct

SEQ ID NO: 10938 - RNA, 22 nt, synthetic construct
  source 1..22: mol_type = other RNA
ccgcctgcgctcagagactcac

SEQ ID NO: 10939 - RNA, 22 nt, synthetic construct
  source 1..22: mol_type = other RNA
ccgcctgcttgtcttcgacacc

SEQ ID NO: 10940 - RNA, 22 nt, synthetic construct
  source 1..22: mol_type = other RNA
ccgccttgcacacaccgttgca

SEQ ID NO: 10941 - RNA, 22 nt, synthetic construct
  source 1..22: mol_type = other RNA
ccgcctttctgccccccacccc

SEQ ID NO: 10942 - RNA, 22 nt, synthetic construct
  source 1..22: mol_type = other RNA
ccgcctttggctcgctccgcct

SEQ ID NO: 10943 - RNA, 22 nt, synthetic construct
  source 1..22: mol_type = other RNA
ccgcgagaacgggggtagggag

SEQ ID NO: 10944 - RNA, 22 nt, synthetic construct
  source 1..22: mol_type = other RNA
ccgcgatctcccctccgtaatc

SEQ ID NO: 10945 - RNA, 22 nt, synthetic construct
  source 1..22: mol_type = other RNA
ccgcgcagtggtttcgctcatg

SEQ ID NO: 10946 - RNA, 22 nt, synthetic construct
  source 1..22: mol_type = other RNA
ccgcgccagagccgatttcact

SEQ ID NO: 10947 - RNA, 22 nt, synthetic construct
  source 1..22: mol_type = other RNA
ccgcgccattggcctctccgcc

SEQ ID NO: 10948 - RNA, 22 nt, synthetic construct
  source 1..22: mol_type = other RNA
ccgcgccccgcgcagtggtttc

SEQ ID NO: 10949 - RNA, 22 nt, synthetic construct
  source 1..22: mol_type = other RNA
ccgcgcccctgcgcaacgtggc

SEQ ID NO: 10950 - RNA, 22 nt, synthetic construct
  source 1..22: mol_type = other RNA
ccgcgcccgcacacccagcatc

SEQ ID NO: 10951 - RNA, 22 nt, synthetic construct
  source 1..22: mol_type = other RNA
ccgcgctcgctctccttgggtc

SEQ ID NO: 10952 - RNA, 22 nt, synthetic construct
  source 1..22: mol_type = other RNA
ccgcggccgccgccatccagaa

SEQ ID NO: 10953 - RNA, 22 nt, synthetic construct
  source 1..22: mol_type = other RNA
ccgcgttgggcctaactcgagt

SEQ ID NO: 10954 - RNA, 22 nt, synthetic construct
  source 1..22: mol_type = other RNA
ccgctcccctacctagccgagg

SEQ ID NO: 10955 - RNA, 22 nt, synthetic construct
  source 1..22: mol_type = other RNA
ccgctcccttctccctccccct

SEQ ID NO: 10956 - RNA, 22 nt, synthetic construct
  source 1..22: mol_type = other RNA
ccgctcctcccccacccccacg

SEQ ID NO: 10957 - RNA, 22 nt, synthetic construct
  source 1..22: mol_type = other RNA
ccgctcgggcagcgggctgagt

SEQ ID NO: 10958 - RNA, 22 nt, synthetic construct
  source 1..22: mol_type = other RNA
ccgctgattggcggcgagtggg

SEQ ID NO: 10959 - RNA, 22 nt, synthetic construct
  source 1..22: mol_type = other RNA
ccgctgcccgagcggaaacgcc

SEQ ID NO: 10960 - RNA, 22 nt, synthetic construct
  source 1..22: mol_type = other RNA
ccgcttagcgactctcgcgttg

SEQ ID NO: 10961 - RNA, 22 nt, synthetic construct
  source 1..22: mol_type = other RNA
ccggaagcgctcctccctctgc

SEQ ID NO: 10962 - RNA, 22 nt, synthetic construct
  source 1..22: mol_type = other RNA
ccggacggagccattgctctcg

SEQ ID NO: 10963 - RNA, 22 nt, synthetic construct
  source 1..22: mol_type = other RNA
ccggagcgccgaagcacagcct

SEQ ID NO: 10964 - RNA, 22 nt, synthetic construct
  source 1..22: mol_type = other RNA
ccggagggggagggagaaggga

SEQ ID NO: 10965 - RNA, 22 nt, synthetic construct
  source 1..22: mol_type = other RNA
ccggcactactgtgttggcgga

SEQ ID NO: 10966 - RNA, 22 nt, synthetic construct
  source 1..22: mol_type = other RNA
ccggcagcgcctgggacaaggt

SEQ ID NO: 10967 - RNA, 22 nt, synthetic construct
  source 1..22: mol_type = other RNA
ccggccaggaaacgccgtggcg

SEQ ID NO: 10968 - RNA, 22 nt, synthetic construct
  source 1..22: mol_type = other RNA
ccggcccccctctttccctggc

SEQ ID NO: 10969 - RNA, 22 nt, synthetic construct
  source 1..22: mol_type = other RNA
ccggccgagacttctggatggc

SEQ ID NO: 10970 - RNA, 22 nt, synthetic construct
  source 1..22: mol_type = other RNA
ccggccgcgcccgcacacccag

SEQ ID NO: 10971 - RNA, 22 nt, synthetic construct
  source 1..22: mol_type = other RNA
ccggcctcctgcggcgggaggg

SEQ ID NO: 10972 - RNA, 22 nt, synthetic construct
  source 1..22: mol_type = other RNA
ccggcgctgggaatccccgtgc

SEQ ID NO: 10973 - RNA, 22 nt, synthetic construct
  source 1..22: mol_type = other RNA
ccggcggcttccgctgattggc

SEQ ID NO: 10974 - RNA, 22 nt, synthetic construct
  source 1..22: mol_type = other RNA
ccggctagcctcttgtcgccga

SEQ ID NO: 10975 - RNA, 22 nt, synthetic construct
  source 1..22: mol_type = other RNA
ccggctcctcagagagcctcgg

SEQ ID NO: 10976 - RNA, 22 nt, synthetic construct
  source 1..22: mol_type = other RNA
ccgggaatggcccgtacccgtg

SEQ ID NO: 10977 - RNA, 22 nt, synthetic construct
  source 1..22: mol_type = other RNA
ccgggacacgccccctcccgcc

SEQ ID NO: 10978 - RNA, 22 nt, synthetic construct
  source 1..22: mol_type = other RNA
ccgggaggcggcaggactcgag

SEQ ID NO: 10979 - RNA, 22 nt, synthetic construct
  source 1..22: mol_type = other RNA
ccgggcccttgctactggctcg

SEQ ID NO: 10980 - RNA, 22 nt, synthetic construct
  source 1..22: mol_type = other RNA
ccggggccgcctagagaagagg

SEQ ID NO: 10981 - RNA, 22 nt, synthetic construct
  source 1..22: mol_type = other RNA
ccgggtgcccctggcgccggcg

SEQ ID NO: 10982 - RNA, 22 nt, synthetic construct
  source 1..22: mol_type = other RNA
ccgggttcccaccgcctgaagg

SEQ ID NO: 10983 - RNA, 22 nt, synthetic construct
  source 1..22: mol_type = other RNA
ccggtcccacagcttcgacagc

SEQ ID NO: 10984 - RNA, 22 nt, synthetic construct
  source 1..22: mol_type = other RNA
ccggtttcgagcattttccgct

SEQ ID NO: 10985 - RNA, 22 nt, synthetic construct
  source 1..22: mol_type = other RNA
ccgtaatcttcctggacgcctt

SEQ ID NO: 10986 - RNA, 22 nt, synthetic construct
  source 1..22: mol_type = other RNA
ccgtaccaacgcccgcctcccc

SEQ ID NO: 10987 - RNA, 22 nt, synthetic construct
  source 1..22: mol_type = other RNA
ccgtacccgtgaggtgggggtg

SEQ ID NO: 10988 - RNA, 22 nt, synthetic construct
  source 1..22: mol_type = other RNA
ccgtccggtttcgagcattttc

SEQ ID NO: 10989 - RNA, 22 nt, synthetic construct
  source 1..22: mol_type = other RNA
ccgtcgggagtacgcagccgct

SEQ ID NO: 10990 - RNA, 22 nt, synthetic construct
  source 1..22: mol_type = other RNA
ccgtctccccgcgctcgctctc

SEQ ID NO: 10991 - RNA, 22 nt, synthetic construct
  source 1..22: mol_type = other RNA
ccgtctggtggcttgcgggggt

SEQ ID NO: 10992 - RNA, 22 nt, synthetic construct
  source 1..22: mol_type = other RNA
ccgtgaggtgggggtggggggc

SEQ ID NO: 10993 - RNA, 22 nt, synthetic construct
  source 1..22: mol_type = other RNA
ccgtgcggtcagtggcgtttcc

SEQ ID NO: 10994 - RNA, 22 nt, synthetic construct
  source 1..22: mol_type = other RNA
ccgtggcgccgcgttgggccta

SEQ ID NO: 10995 - RNA, 22 nt, synthetic construct
  source 1..22: mol_type = other RNA
ccgtggcgtgtgccacagcgtg

SEQ ID NO: 10996 - RNA, 22 nt, synthetic construct
  source 1..22: mol_type = other RNA
ccgtgggaagtcgggaacataa

SEQ ID NO: 10997 - RNA, 22 nt, synthetic construct
  source 1..22: mol_type = other RNA
ccgtgtgtgaaaacacaaatgg

SEQ ID NO: 10998 - RNA, 22 nt, synthetic construct
  source 1..22: mol_type = other RNA
ccgttctcgcggccttgtgaca

SEQ ID NO: 10999 - RNA, 22 nt, synthetic construct
  source 1..22: mol_type = other RNA
ccgttgcaacaccccattttcc

SEQ ID NO: 11000 - RNA, 22 nt, synthetic construct
  source 1..22: mol_type = other RNA
ccgtttctcctcccgccgtgtg

SEQ ID NO: 11001 - RNA, 22 nt, synthetic construct
  source 1..22: mol_type = other RNA
cctaactcgagtcctgccgcct

SEQ ID NO: 11002 - RNA, 22 nt, synthetic construct
  source 1..22: mol_type = other RNA
cctaagagcttggggagggcca

SEQ ID NO: 11003 - RNA, 22 nt, synthetic construct
  source 1..22: mol_type = other RNA
cctacacattcaacgaggctat

SEQ ID NO: 11004 - RNA, 22 nt, synthetic construct
  source 1..22: mol_type = other RNA
cctacactcctcttcacattcc

SEQ ID NO: 11005 - RNA, 22 nt, synthetic construct
  source 1..22: mol_type = other RNA
cctacccccgttctcgcggcct

SEQ ID NO: 11006 - RNA, 22 nt, synthetic construct
  source 1..22: mol_type = other RNA
cctacccgccccacccaggggg

SEQ ID NO: 11007 - RNA, 22 nt, synthetic construct
  source 1..22: mol_type = other RNA
cctacctacccgccccacccag

SEQ ID NO: 11008 - RNA, 22 nt, synthetic construct
  source 1..22: mol_type = other RNA
cctacctagccgaggctctctg

SEQ ID NO: 11009 - RNA, 22 nt, synthetic construct
  source 1..22: mol_type = other RNA
cctactccacgtttacctttcc

SEQ ID NO: 11010 - RNA, 22 nt, synthetic construct
  source 1..22: mol_type = other RNA
cctacttgaaccagggctcttt

SEQ ID NO: 11011 - RNA, 22 nt, synthetic construct
  source 1..22: mol_type = other RNA
cctagagaagaggctgtgcttc

SEQ ID NO: 11012 - RNA, 22 nt, synthetic construct
  source 1..22: mol_type = other RNA
cctagattagagggggatctct

SEQ ID NO: 11013 - RNA, 22 nt, synthetic construct
  source 1..22: mol_type = other RNA
cctagccacccatccccccagt

SEQ ID NO: 11014 - RNA, 22 nt, synthetic construct
  source 1..22: mol_type = other RNA
cctagccgaggctctctgagga

SEQ ID NO: 11015 - RNA, 22 nt, synthetic construct
  source 1..22: mol_type = other RNA
cctcaagggaaaggtaaacgtg

SEQ ID NO: 11016 - RNA, 22 nt, synthetic construct
  source 1..22: mol_type = other RNA
cctcacgatcgggccccagggg

SEQ ID NO: 11017 - RNA, 22 nt, synthetic construct
  source 1..22: mol_type = other RNA
cctcacgggtacgggccattcc

SEQ ID NO: 11018 - RNA, 22 nt, synthetic construct
  source 1..22: mol_type = other RNA
cctcagagagcctcggctaggt

SEQ ID NO: 11019 - RNA, 22 nt, synthetic construct
  source 1..22: mol_type = other RNA
cctcagatggctgcttcccaaa

SEQ ID NO: 11020 - RNA, 22 nt, synthetic construct
  source 1..22: mol_type = other RNA
cctccagcgcgcgcttcctgcc

SEQ ID NO: 11021 - RNA, 22 nt, synthetic construct
  source 1..22: mol_type = other RNA
cctcccaacgtaacaaacatta

SEQ ID NO: 11022 - RNA, 22 nt, synthetic construct
  source 1..22: mol_type = other RNA
cctcccaccagagttccgctcc

SEQ ID NO: 11023 - RNA, 22 nt, synthetic construct
  source 1..22: mol_type = other RNA
cctcccaccctccccttccttc

SEQ ID NO: 11024 - RNA, 22 nt, synthetic construct
  source 1..22: mol_type = other RNA
cctccccaagctcttaggagga

SEQ ID NO: 11025 - RNA, 22 nt, synthetic construct
  source 1..22: mol_type = other RNA
cctcccccaacgcctcttcacc

SEQ ID NO: 11026 - RNA, 22 nt, synthetic construct
  source 1..22: mol_type = other RNA
cctcccccacccccacgagtgc

SEQ ID NO: 11027 - RNA, 22 nt, synthetic construct
  source 1..22: mol_type = other RNA
cctccccgaggccgagcgccgc

SEQ ID NO: 11028 - RNA, 22 nt, synthetic construct
  source 1..22: mol_type = other RNA
cctccccgcctttggctcgctc

SEQ ID NO: 11029 - RNA, 22 nt, synthetic construct
  source 1..22: mol_type = other RNA
cctcccctcccaccagagttcc

SEQ ID NO: 11030 - RNA, 22 nt, synthetic construct
  source 1..22: mol_type = other RNA
cctcccctggggcccgatcgtg

SEQ ID NO: 11031 - RNA, 22 nt, synthetic construct
  source 1..22: mol_type = other RNA
cctccccttccttcgggggagt

SEQ ID NO: 11032 - RNA, 22 nt, synthetic construct
  source 1..22: mol_type = other RNA
cctcccgccgcgccattggcct

SEQ ID NO: 11033 - RNA, 22 nt, synthetic construct
  source 1..22: mol_type = other RNA
cctcccgccgtgtgtgaaaaca

SEQ ID NO: 11034 - RNA, 22 nt, synthetic construct
  source 1..22: mol_type = other RNA
cctcccgcctgcatccagccac

SEQ ID NO: 11035 - RNA, 22 nt, synthetic construct
  source 1..22: mol_type = other RNA
cctccctcccgcctgcatccag

SEQ ID NO: 11036 - RNA, 22 nt, synthetic construct
  source 1..22: mol_type = other RNA
cctccctctgcgagagcaatgg

SEQ ID NO: 11037 - RNA, 22 nt, synthetic construct
  source 1..22: mol_type = other RNA
cctccgctcgaaatacacaggc

SEQ ID NO: 11038 - RNA, 22 nt, synthetic construct
  source 1..22: mol_type = other RNA
cctccggttgccgcagggcggg

SEQ ID NO: 11039 - RNA, 22 nt, synthetic construct
  source 1..22: mol_type = other RNA
cctccgtaatcttcctggacgc

SEQ ID NO: 11040 - RNA, 22 nt, synthetic construct
  source 1..22: mol_type = other RNA
cctccgtctccccgcgctcgct

SEQ ID NO: 11041 - RNA, 22 nt, synthetic construct
  source 1..22: mol_type = other RNA
cctcctaagagcttggggaggg

SEQ ID NO: 11042 - RNA, 22 nt, synthetic construct
  source 1..22: mol_type = other RNA
cctcctccgtctccccgcgctc

SEQ ID NO: 11043 - RNA, 22 nt, synthetic construct
  source 1..22: mol_type = other RNA
cctcctgcggcgggaggggagg

SEQ ID NO: 11044 - RNA, 22 nt, synthetic construct
  source 1..22: mol_type = other RNA
cctcgccgccttgcacacaccg

SEQ ID NO: 11045 - RNA, 22 nt, synthetic construct
  source 1..22: mol_type = other RNA
cctcggctaggtaggggagcgg

SEQ ID NO: 11046 - RNA, 22 nt, synthetic construct
  source 1..22: mol_type = other RNA
cctcggggaggaccgtaccaac

SEQ ID NO: 11047 - RNA, 22 nt, synthetic construct
  source 1..22: mol_type = other RNA
cctcgttgaatgtgtagggttc

SEQ ID NO: 11048 - RNA, 22 nt, synthetic construct
  source 1..22: mol_type = other RNA
cctctaatctaggcgacccaac

SEQ ID NO: 11049 - RNA, 22 nt, synthetic construct
  source 1..22: mol_type = other RNA
cctctcatgcgatttacctact

SEQ ID NO: 11050 - RNA, 22 nt, synthetic construct
  source 1..22: mol_type = other RNA
cctctccgcccaccgccccgca

SEQ ID NO: 11051 - RNA, 22 nt, synthetic construct
  source 1..22: mol_type = other RNA
cctctcctcaagggaaaggtaa

SEQ ID NO: 11052 - RNA, 22 nt, synthetic construct
  source 1..22: mol_type = other RNA
cctctcgttttctggcttccca

SEQ ID NO: 11053 - RNA, 22 nt, synthetic construct
  source 1..22: mol_type = other RNA
cctctgcgagagcaatggctcc

SEQ ID NO: 11054 - RNA, 22 nt, synthetic construct
  source 1..22: mol_type = other RNA
cctctgcgtgtaagtcgggaat

SEQ ID NO: 11055 - RNA, 22 nt, synthetic construct
  source 1..22: mol_type = other RNA
cctcttcacattcccgacttac

SEQ ID NO: 11056 - RNA, 22 nt, synthetic construct
  source 1..22: mol_type = other RNA
cctcttcaccccctttcctggg

SEQ ID NO: 11057 - RNA, 22 nt, synthetic construct
  source 1..22: mol_type = other RNA
cctcttctctaggcggccccgg

SEQ ID NO: 11058 - RNA, 22 nt, synthetic construct
  source 1..22: mol_type = other RNA
cctcttgctgccctccgctcga

SEQ ID NO: 11059 - RNA, 22 nt, synthetic construct
  source 1..22: mol_type = other RNA
cctcttgtcgccgattggccgt

SEQ ID NO: 11060 - RNA, 22 nt, synthetic construct
  source 1..22: mol_type = other RNA
cctgaagggcgagacaagcccg

SEQ ID NO: 11061 - RNA, 22 nt, synthetic construct
  source 1..22: mol_type = other RNA
cctgacccaggaaaaacatgaa

SEQ ID NO: 11062 - RNA, 22 nt, synthetic construct
  source 1..22: mol_type = other RNA
cctgattggctgtcgaagctgt

SEQ ID NO: 11063 - RNA, 22 nt, synthetic construct
  source 1..22: mol_type = other RNA
cctgcatccagccacccctttc

SEQ ID NO: 11064 - RNA, 22 nt, synthetic construct
  source 1..22: mol_type = other RNA
cctgccacgttgcgcaggggcg

SEQ ID NO: 11065 - RNA, 22 nt, synthetic construct
  source 1..22: mol_type = other RNA
cctgcgcaacgtggcaggaagc

SEQ ID NO: 11066 - RNA, 22 nt, synthetic construct
  source 1..22: mol_type = other RNA
cctgcgctcagagactcacgca

SEQ ID NO: 11067 - RNA, 22 nt, synthetic construct
  source 1..22: mol_type = other RNA
cctgcggcaaccggagggggag

SEQ ID NO: 11068 - RNA, 22 nt, synthetic construct
  source 1..22: mol_type = other RNA
cctgcggcgggaggggagggtc

SEQ ID NO: 11069 - RNA, 22 nt, synthetic construct
  source 1..22: mol_type = other RNA
cctgctacaggcactcgtgggg

SEQ ID NO: 11070 - RNA, 22 nt, synthetic construct
  source 1..22: mol_type = other RNA
cctgcttgtcttcgacacctga

SEQ ID NO: 11071 - RNA, 22 nt, synthetic construct
  source 1..22: mol_type = other RNA
cctggacgccttccctctcgtt

SEQ ID NO: 11072 - RNA, 22 nt, synthetic construct
  source 1..22: mol_type = other RNA
cctggagttgagccagattgtg

SEQ ID NO: 11073 - RNA, 22 nt, synthetic construct
  source 1..22: mol_type = other RNA
cctggccctccccaagctctta

SEQ ID NO: 11074 - RNA, 22 nt, synthetic construct
  source 1..22: mol_type = other RNA
cctggccgggaatggcccgtac

SEQ ID NO: 11075 - RNA, 22 nt, synthetic construct
  source 1..22: mol_type = other RNA
cctggcgccggcgctgggaatc

SEQ ID NO: 11076 - RNA, 22 nt, synthetic construct
  source 1..22: mol_type = other RNA
cctgggaaaatggggtgttgca

SEQ ID NO: 11077 - RNA, 22 nt, synthetic construct
  source 1..22: mol_type = other RNA
cctgggaactgcctactccacg

SEQ ID NO: 11078 - RNA, 22 nt, synthetic construct
  source 1..22: mol_type = other RNA
cctgggacaaggtaagggtccg

SEQ ID NO: 11079 - RNA, 22 nt, synthetic construct
  source 1..22: mol_type = other RNA
cctggggcccgatcgtgaggtt

SEQ ID NO: 11080 - RNA, 22 nt, synthetic construct
  source 1..22: mol_type = other RNA
cctgggtcaggacgcttcccct

SEQ ID NO: 11081 - RNA, 22 nt, synthetic construct
  source 1..22: mol_type = other RNA
cctgggtggggcgggtaggtag

SEQ ID NO: 11082 - RNA, 22 nt, synthetic construct
  source 1..22: mol_type = other RNA
cctggttcaagtaggtaaatcg

SEQ ID NO: 11083 - RNA, 22 nt, synthetic construct
  source 1..22: mol_type = other RNA
cctgtagcaggtcgggcttgtc

SEQ ID NO: 11084 - RNA, 22 nt, synthetic construct
  source 1..22: mol_type = other RNA
cctgtcagttacgccgtcggga

SEQ ID NO: 11085 - RNA, 22 nt, synthetic construct
  source 1..22: mol_type = other RNA
cctgtgtatttcgagcggaggg

SEQ ID NO: 11086 - RNA, 22 nt, synthetic construct
  source 1..22: mol_type = other RNA
ccttaccttgtcccaggcgctg

SEQ ID NO: 11087 - RNA, 22 nt, synthetic construct
  source 1..22: mol_type = other RNA
ccttcaggcggtgggaacccgg

SEQ ID NO: 11088 - RNA, 22 nt, synthetic construct
  source 1..22: mol_type = other RNA
ccttccctcccctggggcccga

SEQ ID NO: 11089 - RNA, 22 nt, synthetic construct
  source 1..22: mol_type = other RNA
ccttccctctcgttttctggct

SEQ ID NO: 11090 - RNA, 22 nt, synthetic construct
  source 1..22: mol_type = other RNA
ccttccttcgggggagtcggtt

SEQ ID NO: 11091 - RNA, 22 nt, synthetic construct
  source 1..22: mol_type = other RNA
ccttcgccacccccaccacacg

SEQ ID NO: 11092 - RNA, 22 nt, synthetic construct
  source 1..22: mol_type = other RNA
ccttcgggggagtcggtttacc

SEQ ID NO: 11093 - RNA, 22 nt, synthetic construct
  source 1..22: mol_type = other RNA
ccttctatgctaattgattcta

SEQ ID NO: 11094 - RNA, 22 nt, synthetic construct
  source 1..22: mol_type = other RNA
ccttctccctccccctccggtt

SEQ ID NO: 11095 - RNA, 22 nt, synthetic construct
  source 1..22: mol_type = other RNA
ccttgaggagaggcctcttgct

SEQ ID NO: 11096 - RNA, 22 nt, synthetic construct
  source 1..22: mol_type = other RNA
ccttgcacacaccgttgcaaca

SEQ ID NO: 11097 - RNA, 22 nt, synthetic construct
  source 1..22: mol_type = other RNA
ccttgctactggctcgagtctc

SEQ ID NO: 11098 - RNA, 22 nt, synthetic construct
  source 1..22: mol_type = other RNA
ccttgcttgtctcacttcttgg

SEQ ID NO: 11099 - RNA, 22 nt, synthetic construct
  source 1..22: mol_type = other RNA
ccttgggcgtggagaacgatct

SEQ ID NO: 11100 - RNA, 22 nt, synthetic construct
  source 1..22: mol_type = other RNA
ccttgggtcgtgggcctggccc

SEQ ID NO: 11101 - RNA, 22 nt, synthetic construct
  source 1..22: mol_type = other RNA
ccttgtcccaggcgctgccggg

SEQ ID NO: 11102 - RNA, 22 nt, synthetic construct
  source 1..22: mol_type = other RNA
ccttgtgacagacaactctgat

SEQ ID NO: 11103 - RNA, 22 nt, synthetic construct
  source 1..22: mol_type = other RNA
cctttatgaattctctttccct

SEQ ID NO: 11104 - RNA, 22 nt, synthetic construct
  source 1..22: mol_type = other RNA
cctttcatgtttttcctgggtc

SEQ ID NO: 11105 - RNA, 22 nt, synthetic construct
  source 1..22: mol_type = other RNA
cctttcccgtgggaagtcggga

SEQ ID NO: 11106 - RNA, 22 nt, synthetic construct
  source 1..22: mol_type = other RNA
cctttccctcccaacgtaacaa

SEQ ID NO: 11107 - RNA, 22 nt, synthetic construct
  source 1..22: mol_type = other RNA
cctttcccttgaggagaggcct

SEQ ID NO: 11108 - RNA, 22 nt, synthetic construct
  source 1..22: mol_type = other RNA
cctttcctgggaactgcctact

SEQ ID NO: 11109 - RNA, 22 nt, synthetic construct
  source 1..22: mol_type = other RNA
cctttctgccccccacccccac

SEQ ID NO: 11110 - RNA, 22 nt, synthetic construct
  source 1..22: mol_type = other RNA
cctttgaagatattctcacaag

SEQ ID NO: 11111 - RNA, 22 nt, synthetic construct
  source 1..22: mol_type = other RNA
cctttggctcgctccgcctttc

SEQ ID NO: 11112 - RNA, 22 nt, synthetic construct
  source 1..22: mol_type = other RNA
cctttgggaagcagccatctga

SEQ ID NO: 11113 - RNA, 22 nt, synthetic construct
  source 1..22: mol_type = other RNA
cgaaaccactgcgcggggcgcg

SEQ ID NO: 11114 - RNA, 22 nt, synthetic construct
  source 1..22: mol_type = other RNA
cgaaaccggacggagccattgc

SEQ ID NO: 11115 - RNA, 22 nt, synthetic construct
  source 1..22: mol_type = other RNA
cgaaccctacacattcaacgag

SEQ ID NO: 11116 - RNA, 22 nt, synthetic construct
  source 1..22: mol_type = other RNA
cgaacctcacgatcgggcccca

SEQ ID NO: 11117 - RNA, 22 nt, synthetic construct
  source 1..22: mol_type = other RNA
cgaagacaagcaggcggcgggt

SEQ ID NO: 11118 - RNA, 22 nt, synthetic construct
  source 1..22: mol_type = other RNA
cgaagcacagcctcttctctag

SEQ ID NO: 11119 - RNA, 22 nt, synthetic construct
  source 1..22: mol_type = other RNA
cgaagctgtgggaccgggccct

SEQ ID NO: 11120 - RNA, 22 nt, synthetic construct
  source 1..22: mol_type = other RNA
cgaaggaaggggagggtgggag

SEQ ID NO: 11121 - RNA, 22 nt, synthetic construct
  source 1..22: mol_type = other RNA
cgaaggtaatgcctttgggaag

SEQ ID NO: 11122 - RNA, 22 nt, synthetic construct
  source 1..22: mol_type = other RNA
cgacaagaggctagccggaagc

SEQ ID NO: 11123 - RNA, 22 nt, synthetic construct
  source 1..22: mol_type = other RNA
cgacacaatctggctcaactcc

SEQ ID NO: 11124 - RNA, 22 nt, synthetic construct
  source 1..22: mol_type = other RNA
cgacacctgattggctgtcgaa

SEQ ID NO: 11125 - RNA, 22 nt, synthetic construct
  source 1..22: mol_type = other RNA
cgacagaaaagagaccgaacct

SEQ ID NO: 11126 - RNA, 22 nt, synthetic construct
  source 1..22: mol_type = other RNA
cgacagccaatcaggtgtcgaa

SEQ ID NO: 11127 - RNA, 22 nt, synthetic construct
  source 1..22: mol_type = other RNA
cgacccaactccccctttcatg

SEQ ID NO: 11128 - RNA, 22 nt, synthetic construct
  source 1..22: mol_type = other RNA
cgacccaaggagagcgagcgcg

SEQ ID NO: 11129 - RNA, 22 nt, synthetic construct
  source 1..22: mol_type = other RNA
cgacccccgctcctcccccacc

SEQ ID NO: 11130 - RNA, 22 nt, synthetic construct
  source 1..22: mol_type = other RNA
cgacctgctacaggcactcgtg

SEQ ID NO: 11131 - RNA, 22 nt, synthetic construct
  source 1..22: mol_type = other RNA
cgacggcgtaactgacaggagc

SEQ ID NO: 11132 - RNA, 22 nt, synthetic construct
  source 1..22: mol_type = other RNA
cgactcccccgaaggaagggga

SEQ ID NO: 11133 - RNA, 22 nt, synthetic construct
  source 1..22: mol_type = other RNA
cgactctcgcgttgccccctgg

SEQ ID NO: 11134 - RNA, 22 nt, synthetic construct
  source 1..22: mol_type = other RNA
cgacttacacgcagagggaaag

SEQ ID NO: 11135 - RNA, 22 nt, synthetic construct
  source 1..22: mol_type = other RNA
cgacttcccacgggaaaggcaa

SEQ ID NO: 11136 - RNA, 22 nt, synthetic construct
  source 1..22: mol_type = other RNA
cgagaacgggggtagggagtgg

SEQ ID NO: 11137 - RNA, 22 nt, synthetic construct
  source 1..22: mol_type = other RNA
cgagacaagcccgacctgctac

SEQ ID NO: 11138 - RNA, 22 nt, synthetic construct
  source 1..22: mol_type = other RNA
cgagacttctggatggcggcgg

SEQ ID NO: 11139 - RNA, 22 nt, synthetic construct
  source 1..22: mol_type = other RNA
cgagagcaatggctccgtccgg

SEQ ID NO: 11140 - RNA, 22 nt, synthetic construct
  source 1..22: mol_type = other RNA
cgagagggaaggcgtccaggaa

SEQ ID NO: 11141 - RNA, 22 nt, synthetic construct
  source 1..22: mol_type = other RNA
cgagagtcgctaagcggctgcg

SEQ ID NO: 11142 - RNA, 22 nt, synthetic construct
  source 1..22: mol_type = other RNA
cgagcattttccgctcccttct

SEQ ID NO: 11143 - RNA, 22 nt, synthetic construct
  source 1..22: mol_type = other RNA
cgagccagtagcaagggcccgg

SEQ ID NO: 11144 - RNA, 22 nt, synthetic construct
  source 1..22: mol_type = other RNA
cgagcctggagttgagccagat

SEQ ID NO: 11145 - RNA, 22 nt, synthetic construct
  source 1..22: mol_type = other RNA
cgagcgcggggagacggaggag

SEQ ID NO: 11146 - RNA, 22 nt, synthetic construct
  source 1..22: mol_type = other RNA
cgagcggaaacgccactgaccg

SEQ ID NO: 11147 - RNA, 22 nt, synthetic construct
  source 1..22: mol_type = other RNA
cgagcggagggcagcaagaggc

SEQ ID NO: 11148 - RNA, 22 nt, synthetic construct
  source 1..22: mol_type = other RNA
cgaggccgagcgccgcagtgtc

SEQ ID NO: 11149 - RNA, 22 nt, synthetic construct
  source 1..22: mol_type = other RNA
cgaggctatctcagacacgctg

SEQ ID NO: 11150 - RNA, 22 nt, synthetic construct
  source 1..22: mol_type = other RNA
cgaggctctctgaggagccgga

SEQ ID NO: 11151 - RNA, 22 nt, synthetic construct
  source 1..22: mol_type = other RNA
cgaggggggtgagaagtggcag

SEQ ID NO: 11152 - RNA, 22 nt, synthetic construct
  source 1..22: mol_type = other RNA
cgagtcctgccgcctcccggga

SEQ ID NO: 11153 - RNA, 22 nt, synthetic construct
  source 1..22: mol_type = other RNA
cgagtctcacatgagcgaaacc

SEQ ID NO: 11154 - RNA, 22 nt, synthetic construct
  source 1..22: mol_type = other RNA
cgagtgcctgtagcaggtcggg

SEQ ID NO: 11155 - RNA, 22 nt, synthetic construct
  source 1..22: mol_type = other RNA
cgagtgggccaatgggtgcggg

SEQ ID NO: 11156 - RNA, 22 nt, synthetic construct
  source 1..22: mol_type = other RNA
cgagttaggcccaacgcggcgc

SEQ ID NO: 11157 - RNA, 22 nt, synthetic construct
  source 1..22: mol_type = other RNA
cgatcagagttgtctgtcacaa

SEQ ID NO: 11158 - RNA, 22 nt, synthetic construct
  source 1..22: mol_type = other RNA
cgatcccccactccctaccccc

SEQ ID NO: 11159 - RNA, 22 nt, synthetic construct
  source 1..22: mol_type = other RNA
cgatcgggccccaggggaggga

SEQ ID NO: 11160 - RNA, 22 nt, synthetic construct
  source 1..22: mol_type = other RNA
cgatcgtgaggttcggtctctt

SEQ ID NO: 11161 - RNA, 22 nt, synthetic construct
  source 1..22: mol_type = other RNA
cgatctcccctccgtaatcttc

SEQ ID NO: 11162 - RNA, 22 nt, synthetic construct
  source 1..22: mol_type = other RNA
cgatcttgtgagaatatcttca

SEQ ID NO: 11163 - RNA, 22 nt, synthetic construct
  source 1..22: mol_type = other RNA
cgattggccgtttctcctcccg

SEQ ID NO: 11164 - RNA, 22 nt, synthetic construct
  source 1..22: mol_type = other RNA
cgatttacctacttgaaccagg

SEQ ID NO: 11165 - RNA, 22 nt, synthetic construct
  source 1..22: mol_type = other RNA
cgatttcactgaccctcccctc

SEQ ID NO: 11166 - RNA, 22 nt, synthetic construct
  source 1..22: mol_type = other RNA
cgcaacgtggcaggaagcgcgc

SEQ ID NO: 11167 - RNA, 22 nt, synthetic construct
  source 1..22: mol_type = other RNA
cgcaagccaccagacggccccc

SEQ ID NO: 11168 - RNA, 22 nt, synthetic construct
  source 1..22: mol_type = other RNA
cgcacacccagcatctctacac

SEQ ID NO: 11169 - RNA, 22 nt, synthetic construct
  source 1..22: mol_type = other RNA
cgcacccattggcccactcgcc

SEQ ID NO: 11170 - RNA, 22 nt, synthetic construct
  source 1..22: mol_type = other RNA
cgcacctcccctcccaccagag

SEQ ID NO: 11171 - RNA, 22 nt, synthetic construct
  source 1..22: mol_type = other RNA
cgcacggcactcccgggaggcg

SEQ ID NO: 11172 - RNA, 22 nt, synthetic construct
  source 1..22: mol_type = other RNA
cgcacggggattcccagcgccg

SEQ ID NO: 11173 - RNA, 22 nt, synthetic construct
  source 1..22: mol_type = other RNA
cgcagagggaaagagaattcat

SEQ ID NO: 11174 - RNA, 22 nt, synthetic construct
  source 1..22: mol_type = other RNA
cgcagagggaggagcgcttccg

SEQ ID NO: 11175 - RNA, 22 nt, synthetic construct
  source 1..22: mol_type = other RNA
cgcagccccagtcccgccagtc

SEQ ID NO: 11176 - RNA, 22 nt, synthetic construct
  source 1..22: mol_type = other RNA
cgcagccgcttagcgactctcg

SEQ ID NO: 11177 - RNA, 22 nt, synthetic construct
  source 1..22: mol_type = other RNA
cgcagggcgggcctccctcccg

SEQ ID NO: 11178 - RNA, 22 nt, synthetic construct
  source 1..22: mol_type = other RNA
cgcagtggtttcgctcatgtga

SEQ ID NO: 11179 - RNA, 22 nt, synthetic construct
  source 1..22: mol_type = other RNA
cgcagtgtctggccccgcgccc

SEQ ID NO: 11180 - RNA, 22 nt, synthetic construct
  source 1..22: mol_type = other RNA
cgcatgagagggaaagttaaac

SEQ ID NO: 11181 - RNA, 22 nt, synthetic construct
  source 1..22: mol_type = other RNA
cgccaacacagtagtgccggcc

SEQ ID NO: 11182 - RNA, 22 nt, synthetic construct
  source 1..22: mol_type = other RNA
cgccaatcagcggaagccgccg

SEQ ID NO: 11183 - RNA, 22 nt, synthetic construct
  source 1..22: mol_type = other RNA
cgccacccccaccacacgttct

SEQ ID NO: 11184 - RNA, 22 nt, synthetic construct
  source 1..22: mol_type = other RNA
cgccacccccgcgccccgcgca

SEQ ID NO: 11185 - RNA, 22 nt, synthetic construct
  source 1..22: mol_type = other RNA
cgccacggcgtttcctggccgg

SEQ ID NO: 11186 - RNA, 22 nt, synthetic construct
  source 1..22: mol_type = other RNA
cgccacggggagccagagaacg

SEQ ID NO: 11187 - RNA, 22 nt, synthetic construct
  source 1..22: mol_type = other RNA
cgccactgaccgcacggggatt

SEQ ID NO: 11188 - RNA, 22 nt, synthetic construct
  source 1..22: mol_type = other RNA
cgccagagccgatttcactgac

SEQ ID NO: 11189 - RNA, 22 nt, synthetic construct
  source 1..22: mol_type = other RNA
cgccagtccgccaacacagtag

SEQ ID NO: 11190 - RNA, 22 nt, synthetic construct
  source 1..22: mol_type = other RNA
cgccatccagaagtctcggccg

SEQ ID NO: 11191 - RNA, 22 nt, synthetic construct
  source 1..22: mol_type = other RNA
cgccattggcctctccgcccac

SEQ ID NO: 11192 - RNA, 22 nt, synthetic construct
  source 1..22: mol_type = other RNA
cgccatttgtgttttcacacac

SEQ ID NO: 11193 - RNA, 22 nt, synthetic construct
  source 1..22: mol_type = other RNA
cgcccaagaagtgagacaagca

SEQ ID NO: 11194 - RNA, 22 nt, synthetic construct
  source 1..22: mol_type = other RNA
cgcccaaggcaagtaaaacgac

SEQ ID NO: 11195 - RNA, 22 nt, synthetic construct
  source 1..22: mol_type = other RNA
cgcccaccgccccgcacccatt

SEQ ID NO: 11196 - RNA, 22 nt, synthetic construct
  source 1..22: mol_type = other RNA
cgccccacccagggggcaacgc

SEQ ID NO: 11197 - RNA, 22 nt, synthetic construct
  source 1..22: mol_type = other RNA
cgccccctcccgccgcgccatt

SEQ ID NO: 11198 - RNA, 22 nt, synthetic construct
  source 1..22: mol_type = other RNA
cgccccgcacccattggcccac

SEQ ID NO: 11199 - RNA, 22 nt, synthetic construct
  source 1..22: mol_type = other RNA
cgccccgcgcagtggtttcgct

SEQ ID NO: 11200 - RNA, 22 nt, synthetic construct
  source 1..22: mol_type = other RNA
cgccccgggttcccaccgcctg

SEQ ID NO: 11201 - RNA, 22 nt, synthetic construct
  source 1..22: mol_type = other RNA
cgcccctgcgcaacgtggcagg

SEQ ID NO: 11202 - RNA, 22 nt, synthetic construct
  source 1..22: mol_type = other RNA
cgcccgcacacccagcatctct

SEQ ID NO: 11203 - RNA, 22 nt, synthetic construct
  source 1..22: mol_type = other RNA
cgcccgcctgcgctcagagact

SEQ ID NO: 11204 - RNA, 22 nt, synthetic construct
  source 1..22: mol_type = other RNA
cgcccgcgccagagccgatttc

SEQ ID NO: 11205 - RNA, 22 nt, synthetic construct
  source 1..22: mol_type = other RNA
cgccctgcggcaaccggagggg

SEQ ID NO: 11206 - RNA, 22 nt, synthetic construct
  source 1..22: mol_type = other RNA
cgcccttcaggcggtgggaacc

SEQ ID NO: 11207 - RNA, 22 nt, synthetic construct
  source 1..22: mol_type = other RNA
cgccgaagcacagcctcttctc

SEQ ID NO: 11208 - RNA, 22 nt, synthetic construct
  source 1..22: mol_type = other RNA
cgccgattggccgtttctcctc

SEQ ID NO: 11209 - RNA, 22 nt, synthetic construct
  source 1..22: mol_type = other RNA
cgccgccaatcagcggaagccg

SEQ ID NO: 11210 - RNA, 22 nt, synthetic construct
  source 1..22: mol_type = other RNA
cgccgccatccagaagtctcgg

SEQ ID NO: 11211 - RNA, 22 nt, synthetic construct
  source 1..22: mol_type = other RNA
cgccgcccgcctgcgctcagag

SEQ ID NO: 11212 - RNA, 22 nt, synthetic construct
  source 1..22: mol_type = other RNA
cgccgcctgcttgtcttcgaca

SEQ ID NO: 11213 - RNA, 22 nt, synthetic construct
  source 1..22: mol_type = other RNA
cgccgccttgcacacaccgttg

SEQ ID NO: 11214 - RNA, 22 nt, synthetic construct
  source 1..22: mol_type = other RNA
cgccgcgccattggcctctccg

SEQ ID NO: 11215 - RNA, 22 nt, synthetic construct
  source 1..22: mol_type = other RNA
cgccgcgttgggcctaactcga

SEQ ID NO: 11216 - RNA, 22 nt, synthetic construct
  source 1..22: mol_type = other RNA
cgccggcgctgggaatccccgt

SEQ ID NO: 11217 - RNA, 22 nt, synthetic construct
  source 1..22: mol_type = other RNA
cgccggggccgcctagagaaga

SEQ ID NO: 11218 - RNA, 22 nt, synthetic construct
  source 1..22: mol_type = other RNA
cgccgtcgggagtacgcagccg

SEQ ID NO: 11219 - RNA, 22 nt, synthetic construct
  source 1..22: mol_type = other RNA
cgccgtggcgccgcgttgggcc

SEQ ID NO: 11220 - RNA, 22 nt, synthetic construct
  source 1..22: mol_type = other RNA
cgccgtgtgtgaaaacacaaat

SEQ ID NO: 11221 - RNA, 22 nt, synthetic construct
  source 1..22: mol_type = other RNA
cgcctagagaagaggctgtgct

SEQ ID NO: 11222 - RNA, 22 nt, synthetic construct
  source 1..22: mol_type = other RNA
cgcctagattagagggggatct

SEQ ID NO: 11223 - RNA, 22 nt, synthetic construct
  source 1..22: mol_type = other RNA
cgcctccagcgcgcgcttcctg

SEQ ID NO: 11224 - RNA, 22 nt, synthetic construct
  source 1..22: mol_type = other RNA
cgcctcttcaccccctttcctg

SEQ ID NO: 11225 - RNA, 22 nt, synthetic construct
  source 1..22: mol_type = other RNA
cgcctgaagggcgagacaagcc

SEQ ID NO: 11226 - RNA, 22 nt, synthetic construct
  source 1..22: mol_type = other RNA
cgcctgcatccagccacccctt

SEQ ID NO: 11227 - RNA, 22 nt, synthetic construct
  source 1..22: mol_type = other RNA
cgcctgcgctcagagactcacg

SEQ ID NO: 11228 - RNA, 22 nt, synthetic construct
  source 1..22: mol_type = other RNA
cgcctgcttgtcttcgacacct

SEQ ID NO: 11229 - RNA, 22 nt, synthetic construct
  source 1..22: mol_type = other RNA
cgcctgggacaaggtaagggtc

SEQ ID NO: 11230 - RNA, 22 nt, synthetic construct
  source 1..22: mol_type = other RNA
cgccttccctctcgttttctgg

SEQ ID NO: 11231 - RNA, 22 nt, synthetic construct
  source 1..22: mol_type = other RNA
cgccttgcacacaccgttgcaa

SEQ ID NO: 11232 - RNA, 22 nt, synthetic construct
  source 1..22: mol_type = other RNA
cgcctttctgccccccaccccc

SEQ ID NO: 11233 - RNA, 22 nt, synthetic construct
  source 1..22: mol_type = other RNA
cgcctttggctcgctccgcctt

SEQ ID NO: 11234 - RNA, 22 nt, synthetic construct
  source 1..22: mol_type = other RNA
cgcgagaacgggggtagggagt

SEQ ID NO: 11235 - RNA, 22 nt, synthetic construct
  source 1..22: mol_type = other RNA
cgcgagagtcgctaagcggctg

SEQ ID NO: 11236 - RNA, 22 nt, synthetic construct
  source 1..22: mol_type = other RNA
cgcgatctcccctccgtaatct

SEQ ID NO: 11237 - RNA, 22 nt, synthetic construct
  source 1..22: mol_type = other RNA
cgcgcagtggtttcgctcatgt

SEQ ID NO: 11238 - RNA, 22 nt, synthetic construct
  source 1..22: mol_type = other RNA
cgcgccagagccgatttcactg

SEQ ID NO: 11239 - RNA, 22 nt, synthetic construct
  source 1..22: mol_type = other RNA
cgcgccattggcctctccgccc

SEQ ID NO: 11240 - RNA, 22 nt, synthetic construct
  source 1..22: mol_type = other RNA
cgcgccccgcgcagtggtttcg

SEQ ID NO: 11241 - RNA, 22 nt, synthetic construct
  source 1..22: mol_type = other RNA
cgcgcccctgcgcaacgtggca

SEQ ID NO: 11242 - RNA, 22 nt, synthetic construct
  source 1..22: mol_type = other RNA
cgcgcccgcacacccagcatct

SEQ ID NO: 11243 - RNA, 22 nt, synthetic construct
  source 1..22: mol_type = other RNA
cgcgcgcttcctgccacgttgc

SEQ ID NO: 11244 - RNA, 22 nt, synthetic construct
  source 1..22: mol_type = other RNA
cgcgctcgctctccttgggtcg

SEQ ID NO: 11245 - RNA, 22 nt, synthetic construct
  source 1..22: mol_type = other RNA
cgcgcttcctgccacgttgcgc

SEQ ID NO: 11246 - RNA, 22 nt, synthetic construct
  source 1..22: mol_type = other RNA
cgcggcccccagagcgatcaga

SEQ ID NO: 11247 - RNA, 22 nt, synthetic construct
  source 1..22: mol_type = other RNA
cgcggccgccgccatccagaag

SEQ ID NO: 11248 - RNA, 22 nt, synthetic construct
  source 1..22: mol_type = other RNA
cgcggccttgtgacagacaact

SEQ ID NO: 11249 - RNA, 22 nt, synthetic construct
  source 1..22: mol_type = other RNA
cgcggcgccacggcgtttcctg

SEQ ID NO: 11250 - RNA, 22 nt, synthetic construct
  source 1..22: mol_type = other RNA
cgcgggcgtcctcccaccctcc

SEQ ID NO: 11251 - RNA, 22 nt, synthetic construct
  source 1..22: mol_type = other RNA
cgcggggagacggaggaggtga

SEQ ID NO: 11252 - RNA, 22 nt, synthetic construct
  source 1..22: mol_type = other RNA
cgcggggccagacactgcggcg

SEQ ID NO: 11253 - RNA, 22 nt, synthetic construct
  source 1..22: mol_type = other RNA
cgcgttgccccctgggtggggc

SEQ ID NO: 11254 - RNA, 22 nt, synthetic construct
  source 1..22: mol_type = other RNA
cgcgttgggcctaactcgagtc

SEQ ID NO: 11255 - RNA, 22 nt, synthetic construct
  source 1..22: mol_type = other RNA
cgctaagcggctgcgtactccc

SEQ ID NO: 11256 - RNA, 22 nt, synthetic construct
  source 1..22: mol_type = other RNA
cgctcagagactcacgcagccc

SEQ ID NO: 11257 - RNA, 22 nt, synthetic construct
  source 1..22: mol_type = other RNA
cgctcatgtgagactcgagcca

SEQ ID NO: 11258 - RNA, 22 nt, synthetic construct
  source 1..22: mol_type = other RNA
cgctcccctacctagccgaggc

SEQ ID NO: 11259 - RNA, 22 nt, synthetic construct
  source 1..22: mol_type = other RNA
cgctcccttctccctccccctc

SEQ ID NO: 11260 - RNA, 22 nt, synthetic construct
  source 1..22: mol_type = other RNA
cgctccgcctttctgcccccca

SEQ ID NO: 11261 - RNA, 22 nt, synthetic construct
  source 1..22: mol_type = other RNA
cgctccggctcctcagagagcc

SEQ ID NO: 11262 - RNA, 22 nt, synthetic construct
  source 1..22: mol_type = other RNA
cgctcctcccccacccccacga

SEQ ID NO: 11263 - RNA, 22 nt, synthetic construct
  source 1..22: mol_type = other RNA
cgctcctccctctgcgagagca

SEQ ID NO: 11264 - RNA, 22 nt, synthetic construct
  source 1..22: mol_type = other RNA
cgctcgctctccttgggtcgtg

SEQ ID NO: 11265 - RNA, 22 nt, synthetic construct
  source 1..22: mol_type = other RNA
cgctcggcctcggggaggaccg

SEQ ID NO: 11266 - RNA, 22 nt, synthetic construct
  source 1..22: mol_type = other RNA
cgctcgggcagcgggctgagtg

SEQ ID NO: 11267 - RNA, 22 nt, synthetic construct
  source 1..22: mol_type = other RNA
cgctctccttgggtcgtgggcc

SEQ ID NO: 11268 - RNA, 22 nt, synthetic construct
  source 1..22: mol_type = other RNA
cgctctgggggccgcgatctcc

SEQ ID NO: 11269 - RNA, 22 nt, synthetic construct
  source 1..22: mol_type = other RNA
cgctgattggcggcgagtgggc

SEQ ID NO: 11270 - RNA, 22 nt, synthetic construct
  source 1..22: mol_type = other RNA
cgctgcccgagcggaaacgcca

SEQ ID NO: 11271 - RNA, 22 nt, synthetic construct
  source 1..22: mol_type = other RNA
cgctgggaatccccgtgcggtc

SEQ ID NO: 11272 - RNA, 22 nt, synthetic construct
  source 1..22: mol_type = other RNA
cgctgtggcacacgccacgggg

SEQ ID NO: 11273 - RNA, 22 nt, synthetic construct
  source 1..22: mol_type = other RNA
cgcttagcgactctcgcgttgc

SEQ ID NO: 11274 - RNA, 22 nt, synthetic construct
  source 1..22: mol_type = other RNA
cgcttcccctcccccaacgcct

SEQ ID NO: 11275 - RNA, 22 nt, synthetic construct
  source 1..22: mol_type = other RNA
cgcttccggctagcctcttgtc

SEQ ID NO: 11276 - RNA, 22 nt, synthetic construct
  source 1..22: mol_type = other RNA
cgcttcctgccacgttgcgcag

SEQ ID NO: 11277 - RNA, 22 nt, synthetic construct
  source 1..22: mol_type = other RNA
cggaaaatgctcgaaaccggac

SEQ ID NO: 11278 - RNA, 22 nt, synthetic construct
  source 1..22: mol_type = other RNA
cggaaacgccactgaccgcacg

SEQ ID NO: 11279 - RNA, 22 nt, synthetic construct
  source 1..22: mol_type = other RNA
cggaactctggtgggaggggag

SEQ ID NO: 11280 - RNA, 22 nt, synthetic construct
  source 1..22: mol_type = other RNA
cggaagccgccggggccgccta

SEQ ID NO: 11281 - RNA, 22 nt, synthetic construct
  source 1..22: mol_type = other RNA
cggaagcgctcctccctctgcg

SEQ ID NO: 11282 - RNA, 22 nt, synthetic construct
  source 1..22: mol_type = other RNA
cggacccttaccttgtcccagg

SEQ ID NO: 11283 - RNA, 22 nt, synthetic construct
  source 1..22: mol_type = other RNA
cggacggagccattgctctcgc

SEQ ID NO: 11284 - RNA, 22 nt, synthetic construct
  source 1..22: mol_type = other RNA
cggactggcgggactggggctg

SEQ ID NO: 11285 - RNA, 22 nt, synthetic construct
  source 1..22: mol_type = other RNA
cggagaggccaatggcgcggcg

SEQ ID NO: 11286 - RNA, 22 nt, synthetic construct
  source 1..22: mol_type = other RNA
cggagccattgctctcgcagag

SEQ ID NO: 11287 - RNA, 22 nt, synthetic construct
  source 1..22: mol_type = other RNA
cggagccgcggccgccgccatc

SEQ ID NO: 11288 - RNA, 22 nt, synthetic construct
  source 1..22: mol_type = other RNA
cggagcgccgaagcacagcctc

SEQ ID NO: 11289 - RNA, 22 nt, synthetic construct
  source 1..22: mol_type = other RNA
cggaggaggtgacccttccctc

SEQ ID NO: 11290 - RNA, 22 nt, synthetic construct
  source 1..22: mol_type = other RNA
cggagggcagcaagaggcctct

SEQ ID NO: 11291 - RNA, 22 nt, synthetic construct
  source 1..22: mol_type = other RNA
cggaggggagatcgcggccccc

SEQ ID NO: 11292 - RNA, 22 nt, synthetic construct
  source 1..22: mol_type = other RNA
cggagggggagggagaagggag

SEQ ID NO: 11293 - RNA, 22 nt, synthetic construct
  source 1..22: mol_type = other RNA
cggcaaccggagggggagggag

SEQ ID NO: 11294 - RNA, 22 nt, synthetic construct
  source 1..22: mol_type = other RNA
cggcactactgtgttggcggac

SEQ ID NO: 11295 - RNA, 22 nt, synthetic construct
  source 1..22: mol_type = other RNA
cggcactcccgggaggcggcag

SEQ ID NO: 11296 - RNA, 22 nt, synthetic construct
  source 1..22: mol_type = other RNA
cggcagcgcctgggacaaggta

SEQ ID NO: 11297 - RNA, 22 nt, synthetic construct
  source 1..22: mol_type = other RNA
cggcagctcactcagcccgctg

SEQ ID NO: 11298 - RNA, 22 nt, synthetic construct
  source 1..22: mol_type = other RNA
cggcaggactcgagttaggccc

SEQ ID NO: 11299 - RNA, 22 nt, synthetic construct
  source 1..22: mol_type = other RNA
cggccaatcggcgacaagaggc

SEQ ID NO: 11300 - RNA, 22 nt, synthetic construct
  source 1..22: mol_type = other RNA
cggccaggaaacgccgtggcgc

SEQ ID NO: 11301 - RNA, 22 nt, synthetic construct
  source 1..22: mol_type = other RNA
cggcccccagagcgatcagagt

SEQ ID NO: 11302 - RNA, 22 nt, synthetic construct
  source 1..22: mol_type = other RNA
cggcccccctagccacccatcc

SEQ ID NO: 11303 - RNA, 22 nt, synthetic construct
  source 1..22: mol_type = other RNA
cggcccccctctttccctggcc

SEQ ID NO: 11304 - RNA, 22 nt, synthetic construct
  source 1..22: mol_type = other RNA
cggccccggcggcttccgctga

SEQ ID NO: 11305 - RNA, 22 nt, synthetic construct
  source 1..22: mol_type = other RNA
cggccgagacttctggatggcg

SEQ ID NO: 11306 - RNA, 22 nt, synthetic construct
  source 1..22: mol_type = other RNA
cggccgccgccatccagaagtc

SEQ ID NO: 11307 - RNA, 22 nt, synthetic construct
  source 1..22: mol_type = other RNA
cggccgccgcccgcctgcgctc

SEQ ID NO: 11308 - RNA, 22 nt, synthetic construct
  source 1..22: mol_type = other RNA
cggccgcgcccgcacacccagc

SEQ ID NO: 11309 - RNA, 22 nt, synthetic construct
  source 1..22: mol_type = other RNA
cggcctcctgcggcgggagggg

SEQ ID NO: 11310 - RNA, 22 nt, synthetic construct
  source 1..22: mol_type = other RNA
cggcctcggggaggaccgtacc

SEQ ID NO: 11311 - RNA, 22 nt, synthetic construct
  source 1..22: mol_type = other RNA
cggccttgtgacagacaactct

SEQ ID NO: 11312 - RNA, 22 nt, synthetic construct
  source 1..22: mol_type = other RNA
cggcgacaagaggctagccgga

SEQ ID NO: 11313 - RNA, 22 nt, synthetic construct
  source 1..22: mol_type = other RNA
cggcgaggggggtgagaagtgg

SEQ ID NO: 11314 - RNA, 22 nt, synthetic construct
  source 1..22: mol_type = other RNA
cggcgagtgggccaatgggtgc

SEQ ID NO: 11315 - RNA, 22 nt, synthetic construct
  source 1..22: mol_type = other RNA
cggcgccacggcgtttcctggc

SEQ ID NO: 11316 - RNA, 22 nt, synthetic construct
  source 1..22: mol_type = other RNA
cggcgctccggctcctcagaga

SEQ ID NO: 11317 - RNA, 22 nt, synthetic construct
  source 1..22: mol_type = other RNA
cggcgctcggcctcggggagga

SEQ ID NO: 11318 - RNA, 22 nt, synthetic construct
  source 1..22: mol_type = other RNA
cggcgctgggaatccccgtgcg

SEQ ID NO: 11319 - RNA, 22 nt, synthetic construct
  source 1..22: mol_type = other RNA
cggcggcagctcactcagcccg

SEQ ID NO: 11320 - RNA, 22 nt, synthetic construct
  source 1..22: mol_type = other RNA
cggcggcggcagctcactcagc

SEQ ID NO: 11321 - RNA, 22 nt, synthetic construct
  source 1..22: mol_type = other RNA
cggcggcggcggcagctcactc

SEQ ID NO: 11322 - RNA, 22 nt, synthetic construct
  source 1..22: mol_type = other RNA
cggcggcttccgctgattggcg

SEQ ID NO: 11323 - RNA, 22 nt, synthetic construct
  source 1..22: mol_type = other RNA
cggcgggaggagaaacggccaa

SEQ ID NO: 11324 - RNA, 22 nt, synthetic construct
  source 1..22: mol_type = other RNA
cggcgggaggggagggtcagtg

SEQ ID NO: 11325 - RNA, 22 nt, synthetic construct
  source 1..22: mol_type = other RNA
cggcgggtaaaccgactccccc

SEQ ID NO: 11326 - RNA, 22 nt, synthetic construct
  source 1..22: mol_type = other RNA
cggcgtaactgacaggagcttt

SEQ ID NO: 11327 - RNA, 22 nt, synthetic construct
  source 1..22: mol_type = other RNA
cggcgtttcctggccgggaatg

SEQ ID NO: 11328 - RNA, 22 nt, synthetic construct
  source 1..22: mol_type = other RNA
cggctagcctcttgtcgccgat

SEQ ID NO: 11329 - RNA, 22 nt, synthetic construct
  source 1..22: mol_type = other RNA
cggctaggtaggggagcggaac

SEQ ID NO: 11330 - RNA, 22 nt, synthetic construct
  source 1..22: mol_type = other RNA
cggctccgccccgggttcccac

SEQ ID NO: 11331 - RNA, 22 nt, synthetic construct
  source 1..22: mol_type = other RNA
cggctcctcagagagcctcggc

SEQ ID NO: 11332 - RNA, 22 nt, synthetic construct
  source 1..22: mol_type = other RNA
cggctctggcgcgggcgtcctc

SEQ ID NO: 11333 - RNA, 22 nt, synthetic construct
  source 1..22: mol_type = other RNA
cggctgcgtactcccgacggcg

SEQ ID NO: 11334 - RNA, 22 nt, synthetic construct
  source 1..22: mol_type = other RNA
cggcttccgctgattggcggcg

SEQ ID NO: 11335 - RNA, 22 nt, synthetic construct
  source 1..22: mol_type = other RNA
cgggaaaggcaacccccgcaag

SEQ ID NO: 11336 - RNA, 22 nt, synthetic construct
  source 1..22: mol_type = other RNA
cgggaacataatgtttgttacg

SEQ ID NO: 11337 - RNA, 22 nt, synthetic construct
  source 1..22: mol_type = other RNA
cgggaatggcccgtacccgtga

SEQ ID NO: 11338 - RNA, 22 nt, synthetic construct
  source 1..22: mol_type = other RNA
cgggaatgtgaagaggagtgta

SEQ ID NO: 11339 - RNA, 22 nt, synthetic construct
  source 1..22: mol_type = other RNA
cgggacacgccccctcccgccg

SEQ ID NO: 11340 - RNA, 22 nt, synthetic construct
  source 1..22: mol_type = other RNA
cgggactggggctgcgtgagtc

SEQ ID NO: 11341 - RNA, 22 nt, synthetic construct
  source 1..22: mol_type = other RNA
cgggaggagaaacggccaatcg

SEQ ID NO: 11342 - RNA, 22 nt, synthetic construct
  source 1..22: mol_type = other RNA
cgggaggcggcaggactcgagt

SEQ ID NO: 11343 - RNA, 22 nt, synthetic construct
  source 1..22: mol_type = other RNA
cgggaggggagggtcagtgaaa

SEQ ID NO: 11344 - RNA, 22 nt, synthetic construct
  source 1..22: mol_type = other RNA
cgggagtacgcagccgcttagc

SEQ ID NO: 11345 - RNA, 22 nt, synthetic construct
  source 1..22: mol_type = other RNA
cgggcagcgggctgagtgagct

SEQ ID NO: 11346 - RNA, 22 nt, synthetic construct
  source 1..22: mol_type = other RNA
cgggccattcccggccaggaaa

SEQ ID NO: 11347 - RNA, 22 nt, synthetic construct
  source 1..22: mol_type = other RNA
cgggccccaggggagggaaggg

SEQ ID NO: 11348 - RNA, 22 nt, synthetic construct
  source 1..22: mol_type = other RNA
cgggcccttgctactggctcga

SEQ ID NO: 11349 - RNA, 22 nt, synthetic construct
  source 1..22: mol_type = other RNA
cgggcctccctcccgcctgcat

SEQ ID NO: 11350 - RNA, 22 nt, synthetic construct
  source 1..22: mol_type = other RNA
cgggcgtcctcccaccctcccc

SEQ ID NO: 11351 - RNA, 22 nt, synthetic construct
  source 1..22: mol_type = other RNA
cgggcgttggtacggtcctccc

SEQ ID NO: 11352 - RNA, 22 nt, synthetic construct
  source 1..22: mol_type = other RNA
cgggctgccggccgagacttct

SEQ ID NO: 11353 - RNA, 22 nt, synthetic construct
  source 1..22: mol_type = other RNA
cgggcttgtctcgcccttcagg

SEQ ID NO: 11354 - RNA, 22 nt, synthetic construct
  source 1..22: mol_type = other RNA
cggggagacggaggaggtgacc

SEQ ID NO: 11355 - RNA, 22 nt, synthetic construct
  source 1..22: mol_type = other RNA
cggggagccagagaacgtgtgg

SEQ ID NO: 11356 - RNA, 22 nt, synthetic construct
  source 1..22: mol_type = other RNA
cggggaggaccgtaccaacgcc

SEQ ID NO: 11357 - RNA, 22 nt, synthetic construct
  source 1..22: mol_type = other RNA
cggggaggcgggcgttggtacg

SEQ ID NO: 11358 - RNA, 22 nt, synthetic construct
  source 1..22: mol_type = other RNA
cggggattcccagcgccggcgc

SEQ ID NO: 11359 - RNA, 22 nt, synthetic construct
  source 1..22: mol_type = other RNA
cggggccagacactgcggcgct

SEQ ID NO: 11360 - RNA, 22 nt, synthetic construct
  source 1..22: mol_type = other RNA
cggggccgcctagagaagaggc

SEQ ID NO: 11361 - RNA, 22 nt, synthetic construct
  source 1..22: mol_type = other RNA
cggggcggtgggcggagaggcc

SEQ ID NO: 11362 - RNA, 22 nt, synthetic construct
  source 1..22: mol_type = other RNA
cgggggagtcggtttacccgcc

SEQ ID NO: 11363 - RNA, 22 nt, synthetic construct
  source 1..22: mol_type = other RNA
cgggggcgggctgccggccgag

SEQ ID NO: 11364 - RNA, 22 nt, synthetic construct
  source 1..22: mol_type = other RNA
cgggggtagggagtgggggatc

SEQ ID NO: 11365 - RNA, 22 nt, synthetic construct
  source 1..22: mol_type = other RNA
cgggggtggcggggaggcgggc

SEQ ID NO: 11366 - RNA, 22 nt, synthetic construct
  source 1..22: mol_type = other RNA
cgggggttgcctttcccgtggg

SEQ ID NO: 11367 - RNA, 22 nt, synthetic construct
  source 1..22: mol_type = other RNA
cgggtaaaccgactcccccgaa

SEQ ID NO: 11368 - RNA, 22 nt, synthetic construct
  source 1..22: mol_type = other RNA
cgggtacgggccattcccggcc

SEQ ID NO: 11369 - RNA, 22 nt, synthetic construct
  source 1..22: mol_type = other RNA
cgggtaggtaggtggggtgtag

SEQ ID NO: 11370 - RNA, 22 nt, synthetic construct
  source 1..22: mol_type = other RNA
cgggtgcccctggcgccggcgc

SEQ ID NO: 11371 - RNA, 22 nt, synthetic construct
  source 1..22: mol_type = other RNA
cgggttcccaccgcctgaaggg

SEQ ID NO: 11372 - RNA, 22 nt, synthetic construct
  source 1..22: mol_type = other RNA
cggtacactggggggatgggtg

SEQ ID NO: 11373 - RNA, 22 nt, synthetic construct
  source 1..22: mol_type = other RNA
cggtcagtggcgtttccgctcg

SEQ ID NO: 11374 - RNA, 22 nt, synthetic construct
  source 1..22: mol_type = other RNA
cggtcccacagcttcgacagcc

SEQ ID NO: 11375 - RNA, 22 nt, synthetic construct
  source 1..22: mol_type = other RNA
cggtcctccccgaggccgagcg

SEQ ID NO: 11376 - RNA, 22 nt, synthetic construct
  source 1..22: mol_type = other RNA
cggtctcttttctgtcggaccc

SEQ ID NO: 11377 - RNA, 22 nt, synthetic construct
  source 1..22: mol_type = other RNA
cggtgggcggagaggccaatgg

SEQ ID NO: 11378 - RNA, 22 nt, synthetic construct
  source 1..22: mol_type = other RNA
cggtgtgtgcaaggcggcgagg

SEQ ID NO: 11379 - RNA, 22 nt, synthetic construct
  source 1..22: mol_type = other RNA
cggtttacccgccgcctgcttg

SEQ ID NO: 11380 - RNA, 22 nt, synthetic construct
  source 1..22: mol_type = other RNA
cggtttcgagcattttccgctc

SEQ ID NO: 11381 - RNA, 22 nt, synthetic construct
  source 1..22: mol_type = other RNA
cgtaacaaacattatgttcccg

SEQ ID NO: 11382 - RNA, 22 nt, synthetic construct
  source 1..22: mol_type = other RNA
cgtaactgacaggagctttact

SEQ ID NO: 11383 - RNA, 22 nt, synthetic construct
  source 1..22: mol_type = other RNA
cgtaatcttcctggacgccttc

SEQ ID NO: 11384 - RNA, 22 nt, synthetic construct
  source 1..22: mol_type = other RNA
cgtaccaacgcccgcctccccg

SEQ ID NO: 11385 - RNA, 22 nt, synthetic construct
  source 1..22: mol_type = other RNA
cgtacccgtgaggtgggggtgg

SEQ ID NO: 11386 - RNA, 22 nt, synthetic construct
  source 1..22: mol_type = other RNA
cgtactcccgacggcgtaactg

SEQ ID NO: 11387 - RNA, 22 nt, synthetic construct
  source 1..22: mol_type = other RNA
cgtattctggttggagtaaagc

SEQ ID NO: 11388 - RNA, 22 nt, synthetic construct
  source 1..22: mol_type = other RNA
cgtcagtggtctttctcttgga

SEQ ID NO: 11389 - RNA, 22 nt, synthetic construct
  source 1..22: mol_type = other RNA
cgtccaggaagattacggaggg

SEQ ID NO: 11390 - RNA, 22 nt, synthetic construct
  source 1..22: mol_type = other RNA
cgtccggtttcgagcattttcc

SEQ ID NO: 11391 - RNA, 22 nt, synthetic construct
  source 1..22: mol_type = other RNA
cgtcctcccaccctccccttcc

SEQ ID NO: 11392 - RNA, 22 nt, synthetic construct
  source 1..22: mol_type = other RNA
cgtcctgacccaggaaaaacat

SEQ ID NO: 11393 - RNA, 22 nt, synthetic construct
  source 1..22: mol_type = other RNA
cgtcgggagtacgcagccgctt

SEQ ID NO: 11394 - RNA, 22 nt, synthetic construct
  source 1..22: mol_type = other RNA
cgtctccccgcgctcgctctcc

SEQ ID NO: 11395 - RNA, 22 nt, synthetic construct
  source 1..22: mol_type = other RNA
cgtctggtggcttgcgggggtt

SEQ ID NO: 11396 - RNA, 22 nt, synthetic construct
  source 1..22: mol_type = other RNA
cgtgaggtgggggtggggggca

SEQ ID NO: 11397 - RNA, 22 nt, synthetic construct
  source 1..22: mol_type = other RNA
cgtgaggttcggtctcttttct

SEQ ID NO: 11398 - RNA, 22 nt, synthetic construct
  source 1..22: mol_type = other RNA
cgtgagtctctgagcgcaggcg

SEQ ID NO: 11399 - RNA, 22 nt, synthetic construct
  source 1..22: mol_type = other RNA
cgtgcggtcagtggcgtttccg

SEQ ID NO: 11400 - RNA, 22 nt, synthetic construct
  source 1..22: mol_type = other RNA
cgtggagaacgatcttgtgaga

SEQ ID NO: 11401 - RNA, 22 nt, synthetic construct
  source 1..22: mol_type = other RNA
cgtggagtaggcagttcccagg

SEQ ID NO: 11402 - RNA, 22 nt, synthetic construct
  source 1..22: mol_type = other RNA
cgtggcaggaagcgcgcgctgg

SEQ ID NO: 11403 - RNA, 22 nt, synthetic construct
  source 1..22: mol_type = other RNA
cgtggcgccgcgttgggcctaa

SEQ ID NO: 11404 - RNA, 22 nt, synthetic construct
  source 1..22: mol_type = other RNA
cgtggcgtgtgccacagcgtgt

SEQ ID NO: 11405 - RNA, 22 nt, synthetic construct
  source 1..22: mol_type = other RNA
cgtgggaagtcgggaacataat

SEQ ID NO: 11406 - RNA, 22 nt, synthetic construct
  source 1..22: mol_type = other RNA
cgtgggcctggccctccccaag

SEQ ID NO: 11407 - RNA, 22 nt, synthetic construct
  source 1..22: mol_type = other RNA
cgtgggggtgggggaggagcgg

SEQ ID NO: 11408 - RNA, 22 nt, synthetic construct
  source 1..22: mol_type = other RNA
cgtgtaagtcgggaatgtgaag

SEQ ID NO: 11409 - RNA, 22 nt, synthetic construct
  source 1..22: mol_type = other RNA
cgtgtctgagatagcctcgttg

SEQ ID NO: 11410 - RNA, 22 nt, synthetic construct
  source 1..22: mol_type = other RNA
cgtgtgccacagcgtgtctgag

SEQ ID NO: 11411 - RNA, 22 nt, synthetic construct
  source 1..22: mol_type = other RNA
cgtgtggtgggggtggcgaagg

SEQ ID NO: 11412 - RNA, 22 nt, synthetic construct
  source 1..22: mol_type = other RNA
cgtgtgtgaaaacacaaatggc

SEQ ID NO: 11413 - RNA, 22 nt, synthetic construct
  source 1..22: mol_type = other RNA
cgttctccacgcccaaggcaag

SEQ ID NO: 11414 - RNA, 22 nt, synthetic construct
  source 1..22: mol_type = other RNA
cgttctcgcggccttgtgacag

SEQ ID NO: 11415 - RNA, 22 nt, synthetic construct
  source 1..22: mol_type = other RNA
cgttctctggctccccgtggcg

SEQ ID NO: 11416 - RNA, 22 nt, synthetic construct
  source 1..22: mol_type = other RNA
cgttgaatgtgtagggttcgag

SEQ ID NO: 11417 - RNA, 22 nt, synthetic construct
  source 1..22: mol_type = other RNA
cgttgcaacaccccattttccc

SEQ ID NO: 11418 - RNA, 22 nt, synthetic construct
  source 1..22: mol_type = other RNA
cgttgccccctgggtggggcgg

SEQ ID NO: 11419 - RNA, 22 nt, synthetic construct
  source 1..22: mol_type = other RNA
cgttgcgcaggggcgcggggcc

SEQ ID NO: 11420 - RNA, 22 nt, synthetic construct
  source 1..22: mol_type = other RNA
cgttgggagggaaaggggtggc

SEQ ID NO: 11421 - RNA, 22 nt, synthetic construct
  source 1..22: mol_type = other RNA
cgttgggcctaactcgagtcct

SEQ ID NO: 11422 - RNA, 22 nt, synthetic construct
  source 1..22: mol_type = other RNA
cgttgggggaggggaagcgtcc

SEQ ID NO: 11423 - RNA, 22 nt, synthetic construct
  source 1..22: mol_type = other RNA
cgttggtacggtcctccccgag

SEQ ID NO: 11424 - RNA, 22 nt, synthetic construct
  source 1..22: mol_type = other RNA
cgtttacctttcccttgaggag

SEQ ID NO: 11425 - RNA, 22 nt, synthetic construct
  source 1..22: mol_type = other RNA
cgtttccgctcgggcagcgggc

SEQ ID NO: 11426 - RNA, 22 nt, synthetic construct
  source 1..22: mol_type = other RNA
cgtttcctggccgggaatggcc

SEQ ID NO: 11427 - RNA, 22 nt, synthetic construct
  source 1..22: mol_type = other RNA
cgtttctcctcccgccgtgtgt

SEQ ID NO: 11428 - RNA, 22 nt, synthetic construct
  source 1..22: mol_type = other RNA
cgttttacttgccttgggcgtg

SEQ ID NO: 11429 - RNA, 22 nt, synthetic construct
  source 1..22: mol_type = other RNA
cgttttctggcttcccacctca

SEQ ID NO: 11430 - RNA, 22 nt, synthetic construct
  source 1..22: mol_type = other RNA
ctaactcgagtcctgccgcctc

SEQ ID NO: 11431 - RNA, 22 nt, synthetic construct
  source 1..22: mol_type = other RNA
ctaagagcttggggagggccag

SEQ ID NO: 11432 - RNA, 22 nt, synthetic construct
  source 1..22: mol_type = other RNA
ctaagcggctgcgtactcccga

SEQ ID NO: 11433 - RNA, 22 nt, synthetic construct
  source 1..22: mol_type = other RNA
ctaatctaggcgacccaactcc

SEQ ID NO: 11434 - RNA, 22 nt, synthetic construct
  source 1..22: mol_type = other RNA
ctaattgattctatagagtcct

SEQ ID NO: 11435 - RNA, 22 nt, synthetic construct
  source 1..22: mol_type = other RNA
ctacacattcaacgaggctatc

SEQ ID NO: 11436 - RNA, 22 nt, synthetic construct
  source 1..22: mol_type = other RNA
ctacaccccacctacctacccg

SEQ ID NO: 11437 - RNA, 22 nt, synthetic construct
  source 1..22: mol_type = other RNA
ctacactcctcttcacattccc

SEQ ID NO: 11438 - RNA, 22 nt, synthetic construct
  source 1..22: mol_type = other RNA
ctacaggcactcgtgggggtgg

SEQ ID NO: 11439 - RNA, 22 nt, synthetic construct
  source 1..22: mol_type = other RNA
ctacccccgttctcgcggcctt

SEQ ID NO: 11440 - RNA, 22 nt, synthetic construct
  source 1..22: mol_type = other RNA
ctacccgccccacccagggggc

SEQ ID NO: 11441 - RNA, 22 nt, synthetic construct
  source 1..22: mol_type = other RNA
ctacctacccgccccacccagg

SEQ ID NO: 11442 - RNA, 22 nt, synthetic construct
  source 1..22: mol_type = other RNA
ctacctagccgaggctctctga

SEQ ID NO: 11443 - RNA, 22 nt, synthetic construct
  source 1..22: mol_type = other RNA
ctactccacgtttacctttccc

SEQ ID NO: 11444 - RNA, 22 nt, synthetic construct
  source 1..22: mol_type = other RNA
ctactggctcgagtctcacatg

SEQ ID NO: 11445 - RNA, 22 nt, synthetic construct
  source 1..22: mol_type = other RNA
ctactgtgttggcggactggcg

SEQ ID NO: 11446 - RNA, 22 nt, synthetic construct
  source 1..22: mol_type = other RNA
ctacttgaaccagggctctttc

SEQ ID NO: 11447 - RNA, 22 nt, synthetic construct
  source 1..22: mol_type = other RNA
ctagagaagaggctgtgcttcg

SEQ ID NO: 11448 - RNA, 22 nt, synthetic construct
  source 1..22: mol_type = other RNA
ctagattagagggggatctctc

SEQ ID NO: 11449 - RNA, 22 nt, synthetic construct
  source 1..22: mol_type = other RNA
ctagccacccatccccccagtg

SEQ ID NO: 11450 - RNA, 22 nt, synthetic construct
  source 1..22: mol_type = other RNA
ctagccgaggctctctgaggag

SEQ ID NO: 11451 - RNA, 22 nt, synthetic construct
  source 1..22: mol_type = other RNA
ctagccggaagcgctcctccct

SEQ ID NO: 11452 - RNA, 22 nt, synthetic construct
  source 1..22: mol_type = other RNA
ctagcctcttgtcgccgattgg

SEQ ID NO: 11453 - RNA, 22 nt, synthetic construct
  source 1..22: mol_type = other RNA
ctaggcgacccaactccccctt

SEQ ID NO: 11454 - RNA, 22 nt, synthetic construct
  source 1..22: mol_type = other RNA
ctaggcggccccggcggcttcc

SEQ ID NO: 11455 - RNA, 22 nt, synthetic construct
  source 1..22: mol_type = other RNA
ctaggggggccgtctggtggct

SEQ ID NO: 11456 - RNA, 22 nt, synthetic construct
  source 1..22: mol_type = other RNA
ctaggtaggggagcggaactct

SEQ ID NO: 11457 - RNA, 22 nt, synthetic construct
  source 1..22: mol_type = other RNA
ctatagaatcaattagcataga

SEQ ID NO: 11458 - RNA, 22 nt, synthetic construct
  source 1..22: mol_type = other RNA
ctatagagtccttgcttgtctc

SEQ ID NO: 11459 - RNA, 22 nt, synthetic construct
  source 1..22: mol_type = other RNA
ctatctcagacacgctgtggca

SEQ ID NO: 11460 - RNA, 22 nt, synthetic construct
  source 1..22: mol_type = other RNA
ctatgctaattgattctataga

SEQ ID NO: 11461 - RNA, 22 nt, synthetic construct
  source 1..22: mol_type = other RNA
ctcaactccaggctcgaaccct

SEQ ID NO: 11462 - RNA, 22 nt, synthetic construct
  source 1..22: mol_type = other RNA
ctcaagggaaaggtaaacgtgg

SEQ ID NO: 11463 - RNA, 22 nt, synthetic construct
  source 1..22: mol_type = other RNA
ctcacaagatcgttctccacgc

SEQ ID NO: 11464 - RNA, 22 nt, synthetic construct
  source 1..22: mol_type = other RNA
ctcacatgagcgaaaccactgc

SEQ ID NO: 11465 - RNA, 22 nt, synthetic construct
  source 1..22: mol_type = other RNA
ctcacccccctcgccgccttgc

SEQ ID NO: 11466 - RNA, 22 nt, synthetic construct
  source 1..22: mol_type = other RNA
ctcacgatcgggccccagggga

SEQ ID NO: 11467 - RNA, 22 nt, synthetic construct
  source 1..22: mol_type = other RNA
ctcacgcagccccagtcccgcc

SEQ ID NO: 11468 - RNA, 22 nt, synthetic construct
  source 1..22: mol_type = other RNA
ctcacgggtacgggccattccc

SEQ ID NO: 11469 - RNA, 22 nt, synthetic construct
  source 1..22: mol_type = other RNA
ctcactcagcccgctgcccgag

SEQ ID NO: 11470 - RNA, 22 nt, synthetic construct
  source 1..22: mol_type = other RNA
ctcacttcttgggcgtcagtgg

SEQ ID NO: 11471 - RNA, 22 nt, synthetic construct
  source 1..22: mol_type = other RNA
ctcagacacgctgtggcacacg

SEQ ID NO: 11472 - RNA, 22 nt, synthetic construct
  source 1..22: mol_type = other RNA
ctcagagactcacgcagcccca

SEQ ID NO: 11473 - RNA, 22 nt, synthetic construct
  source 1..22: mol_type = other RNA
ctcagagagcctcggctaggta

SEQ ID NO: 11474 - RNA, 22 nt, synthetic construct
  source 1..22: mol_type = other RNA
ctcagatggctgcttcccaaag

SEQ ID NO: 11475 - RNA, 22 nt, synthetic construct
  source 1..22: mol_type = other RNA
ctcagcccgctgcccgagcgga

SEQ ID NO: 11476 - RNA, 22 nt, synthetic construct
  source 1..22: mol_type = other RNA
ctcatgcgatttacctacttga

SEQ ID NO: 11477 - RNA, 22 nt, synthetic construct
  source 1..22: mol_type = other RNA
ctcatgtgagactcgagccagt

SEQ ID NO: 11478 - RNA, 22 nt, synthetic construct
  source 1..22: mol_type = other RNA
ctccaaccagaatacgccattt

SEQ ID NO: 11479 - RNA, 22 nt, synthetic construct
  source 1..22: mol_type = other RNA
ctccacgcccaaggcaagtaaa

SEQ ID NO: 11480 - RNA, 22 nt, synthetic construct
  source 1..22: mol_type = other RNA
ctccacgtttacctttcccttg

SEQ ID NO: 11481 - RNA, 22 nt, synthetic construct
  source 1..22: mol_type = other RNA
ctccagcgcgcgcttcctgcca

SEQ ID NO: 11482 - RNA, 22 nt, synthetic construct
  source 1..22: mol_type = other RNA
ctccaggctcgaaccctacaca

SEQ ID NO: 11483 - RNA, 22 nt, synthetic construct
  source 1..22: mol_type = other RNA
ctcccaacgtaacaaacattat

SEQ ID NO: 11484 - RNA, 22 nt, synthetic construct
  source 1..22: mol_type = other RNA
ctcccaccagagttccgctccc

SEQ ID NO: 11485 - RNA, 22 nt, synthetic construct
  source 1..22: mol_type = other RNA
ctcccaccctccccttccttcg

SEQ ID NO: 11486 - RNA, 22 nt, synthetic construct
  source 1..22: mol_type = other RNA
ctccccaagctcttaggaggat

SEQ ID NO: 11487 - RNA, 22 nt, synthetic construct
  source 1..22: mol_type = other RNA
ctcccccaacgcctcttcaccc

SEQ ID NO: 11488 - RNA, 22 nt, synthetic construct
  source 1..22: mol_type = other RNA
ctcccccacccccacgagtgcc

SEQ ID NO: 11489 - RNA, 22 nt, synthetic construct
  source 1..22: mol_type = other RNA
ctcccccgaaggaaggggaggg

SEQ ID NO: 11490 - RNA, 22 nt, synthetic construct
  source 1..22: mol_type = other RNA
ctccccctccggttgccgcagg

SEQ ID NO: 11491 - RNA, 22 nt, synthetic construct
  source 1..22: mol_type = other RNA
ctccccctttcatgtttttcct

SEQ ID NO: 11492 - RNA, 22 nt, synthetic construct
  source 1..22: mol_type = other RNA
ctccccgaggccgagcgccgca

SEQ ID NO: 11493 - RNA, 22 nt, synthetic construct
  source 1..22: mol_type = other RNA
ctccccgatcccccactcccta

SEQ ID NO: 11494 - RNA, 22 nt, synthetic construct
  source 1..22: mol_type = other RNA
ctccccgcctttggctcgctcc

SEQ ID NO: 11495 - RNA, 22 nt, synthetic construct
  source 1..22: mol_type = other RNA
ctccccgcgctcgctctccttg

SEQ ID NO: 11496 - RNA, 22 nt, synthetic construct
  source 1..22: mol_type = other RNA
ctccccgtggcgtgtgccacag

SEQ ID NO: 11497 - RNA, 22 nt, synthetic construct
  source 1..22: mol_type = other RNA
ctcccctacctagccgaggctc

SEQ ID NO: 11498 - RNA, 22 nt, synthetic construct
  source 1..22: mol_type = other RNA
ctcccctcccaccagagttccg

SEQ ID NO: 11499 - RNA, 22 nt, synthetic construct
  source 1..22: mol_type = other RNA
ctcccctccgtaatcttcctgg

SEQ ID NO: 11500 - RNA, 22 nt, synthetic construct
  source 1..22: mol_type = other RNA
ctcccctggggcccgatcgtga

SEQ ID NO: 11501 - RNA, 22 nt, synthetic construct
  source 1..22: mol_type = other RNA
ctccccttccttcgggggagtc

SEQ ID NO: 11502 - RNA, 22 nt, synthetic construct
  source 1..22: mol_type = other RNA
ctcccgacggcgtaactgacag

SEQ ID NO: 11503 - RNA, 22 nt, synthetic construct
  source 1..22: mol_type = other RNA
ctcccgccgcgccattggcctc

SEQ ID NO: 11504 - RNA, 22 nt, synthetic construct
  source 1..22: mol_type = other RNA
ctcccgccgtgtgtgaaaacac

SEQ ID NO: 11505 - RNA, 22 nt, synthetic construct
  source 1..22: mol_type = other RNA
ctcccgcctgcatccagccacc

SEQ ID NO: 11506 - RNA, 22 nt, synthetic construct
  source 1..22: mol_type = other RNA
ctcccgggaggcggcaggactc

SEQ ID NO: 11507 - RNA, 22 nt, synthetic construct
  source 1..22: mol_type = other RNA
ctccctacccccgttctcgcgg

SEQ ID NO: 11508 - RNA, 22 nt, synthetic construct
  source 1..22: mol_type = other RNA
ctccctccccctccggttgccg

SEQ ID NO: 11509 - RNA, 22 nt, synthetic construct
  source 1..22: mol_type = other RNA
ctccctcccgcctgcatccagc

SEQ ID NO: 11510 - RNA, 22 nt, synthetic construct
  source 1..22: mol_type = other RNA
ctccctctgcgagagcaatggc

SEQ ID NO: 11511 - RNA, 22 nt, synthetic construct
  source 1..22: mol_type = other RNA
ctccctgggaaaatggggtgtt

SEQ ID NO: 11512 - RNA, 22 nt, synthetic construct
  source 1..22: mol_type = other RNA
ctcccttctccctccccctccg

SEQ ID NO: 11513 - RNA, 22 nt, synthetic construct
  source 1..22: mol_type = other RNA
ctccgcccaccgccccgcaccc

SEQ ID NO: 11514 - RNA, 22 nt, synthetic construct
  source 1..22: mol_type = other RNA
ctccgccccgggttcccaccgc

SEQ ID NO: 11515 - RNA, 22 nt, synthetic construct
  source 1..22: mol_type = other RNA
ctccgcctttctgccccccacc

SEQ ID NO: 11516 - RNA, 22 nt, synthetic construct
  source 1..22: mol_type = other RNA
ctccgctcgaaatacacaggca

SEQ ID NO: 11517 - RNA, 22 nt, synthetic construct
  source 1..22: mol_type = other RNA
ctccggctcctcagagagcctc

SEQ ID NO: 11518 - RNA, 22 nt, synthetic construct
  source 1..22: mol_type = other RNA
ctccggttgccgcagggcgggc

SEQ ID NO: 11519 - RNA, 22 nt, synthetic construct
  source 1..22: mol_type = other RNA
ctccgtaatcttcctggacgcc

SEQ ID NO: 11520 - RNA, 22 nt, synthetic construct
  source 1..22: mol_type = other RNA
ctccgtccggtttcgagcattt

SEQ ID NO: 11521 - RNA, 22 nt, synthetic construct
  source 1..22: mol_type = other RNA
ctccgtctccccgcgctcgctc

SEQ ID NO: 11522 - RNA, 22 nt, synthetic construct
  source 1..22: mol_type = other RNA
ctcctaagagcttggggagggc

SEQ ID NO: 11523 - RNA, 22 nt, synthetic construct
  source 1..22: mol_type = other RNA
ctcctcaagggaaaggtaaacg

SEQ ID NO: 11524 - RNA, 22 nt, synthetic construct
  source 1..22: mol_type = other RNA
ctcctcagagagcctcggctag

SEQ ID NO: 11525 - RNA, 22 nt, synthetic construct
  source 1..22: mol_type = other RNA
ctcctcccccacccccacgagt

SEQ ID NO: 11526 - RNA, 22 nt, synthetic construct
  source 1..22: mol_type = other RNA
ctcctcccgccgtgtgtgaaaa

SEQ ID NO: 11527 - RNA, 22 nt, synthetic construct
  source 1..22: mol_type = other RNA
ctcctccctctgcgagagcaat

SEQ ID NO: 11528 - RNA, 22 nt, synthetic construct
  source 1..22: mol_type = other RNA
ctcctccgtctccccgcgctcg

SEQ ID NO: 11529 - RNA, 22 nt, synthetic construct
  source 1..22: mol_type = other RNA
ctcctcttcacattcccgactt

SEQ ID NO: 11530 - RNA, 22 nt, synthetic construct
  source 1..22: mol_type = other RNA
ctcctgcggcgggaggggaggg

SEQ ID NO: 11531 - RNA, 22 nt, synthetic construct
  source 1..22: mol_type = other RNA
ctcctgtcagttacgccgtcgg

SEQ ID NO: 11532 - RNA, 22 nt, synthetic construct
  source 1..22: mol_type = other RNA
ctccttgggtcgtgggcctggc

SEQ ID NO: 11533 - RNA, 22 nt, synthetic construct
  source 1..22: mol_type = other RNA
ctcgaaaccggacggagccatt

SEQ ID NO: 11534 - RNA, 22 nt, synthetic construct
  source 1..22: mol_type = other RNA
ctcgaaccctacacattcaacg

SEQ ID NO: 11535 - RNA, 22 nt, synthetic construct
  source 1..22: mol_type = other RNA
ctcgagccagtagcaagggccc

SEQ ID NO: 11536 - RNA, 22 nt, synthetic construct
  source 1..22: mol_type = other RNA
ctcgagtcctgccgcctcccgg

SEQ ID NO: 11537 - RNA, 22 nt, synthetic construct
  source 1..22: mol_type = other RNA
ctcgagtctcacatgagcgaaa

SEQ ID NO: 11538 - RNA, 22 nt, synthetic construct
  source 1..22: mol_type = other RNA
ctcgagttaggcccaacgcggc

SEQ ID NO: 11539 - RNA, 22 nt, synthetic construct
  source 1..22: mol_type = other RNA
ctcgcagagggaggagcgcttc

SEQ ID NO: 11540 - RNA, 22 nt, synthetic construct
  source 1..22: mol_type = other RNA
ctcgcccttcaggcggtgggaa

SEQ ID NO: 11541 - RNA, 22 nt, synthetic construct
  source 1..22: mol_type = other RNA
ctcgccgccaatcagcggaagc

SEQ ID NO: 11542 - RNA, 22 nt, synthetic construct
  source 1..22: mol_type = other RNA
ctcgccgccttgcacacaccgt

SEQ ID NO: 11543 - RNA, 22 nt, synthetic construct
  source 1..22: mol_type = other RNA
ctcgcggccttgtgacagacaa

SEQ ID NO: 11544 - RNA, 22 nt, synthetic construct
  source 1..22: mol_type = other RNA
ctcgcgttgccccctgggtggg

SEQ ID NO: 11545 - RNA, 22 nt, synthetic construct
  source 1..22: mol_type = other RNA
ctcgctccgcctttctgccccc

SEQ ID NO: 11546 - RNA, 22 nt, synthetic construct
  source 1..22: mol_type = other RNA
ctcgctctccttgggtcgtggg

SEQ ID NO: 11547 - RNA, 22 nt, synthetic construct
  source 1..22: mol_type = other RNA
ctcggcctcggggaggaccgta

SEQ ID NO: 11548 - RNA, 22 nt, synthetic construct
  source 1..22: mol_type = other RNA
ctcggctaggtaggggagcgga

SEQ ID NO: 11549 - RNA, 22 nt, synthetic construct
  source 1..22: mol_type = other RNA
ctcgggcagcgggctgagtgag

SEQ ID NO: 11550 - RNA, 22 nt, synthetic construct
  source 1..22: mol_type = other RNA
ctcggggaggaccgtaccaacg

SEQ ID NO: 11551 - RNA, 22 nt, synthetic construct
  source 1..22: mol_type = other RNA
ctcgtgggggtgggggaggagc

SEQ ID NO: 11552 - RNA, 22 nt, synthetic construct
  source 1..22: mol_type = other RNA
ctcgttgaatgtgtagggttcg

SEQ ID NO: 11553 - RNA, 22 nt, synthetic construct
  source 1..22: mol_type = other RNA
ctcgttttctggcttcccacct

SEQ ID NO: 11554 - RNA, 22 nt, synthetic construct
  source 1..22: mol_type = other RNA
ctctaatctaggcgacccaact

SEQ ID NO: 11555 - RNA, 22 nt, synthetic construct
  source 1..22: mol_type = other RNA
ctctacaccccacctacctacc

SEQ ID NO: 11556 - RNA, 22 nt, synthetic construct
  source 1..22: mol_type = other RNA
ctctaggcggccccggcggctt

SEQ ID NO: 11557 - RNA, 22 nt, synthetic construct
  source 1..22: mol_type = other RNA
ctctatagaatcaattagcata

SEQ ID NO: 11558 - RNA, 22 nt, synthetic construct
  source 1..22: mol_type = other RNA
ctctcatgcgatttacctactt

SEQ ID NO: 11559 - RNA, 22 nt, synthetic construct
  source 1..22: mol_type = other RNA
ctctccccgatcccccactccc

SEQ ID NO: 11560 - RNA, 22 nt, synthetic construct
  source 1..22: mol_type = other RNA
ctctccctgggaaaatggggtg

SEQ ID NO: 11561 - RNA, 22 nt, synthetic construct
  source 1..22: mol_type = other RNA
ctctccgcccaccgccccgcac

SEQ ID NO: 11562 - RNA, 22 nt, synthetic construct
  source 1..22: mol_type = other RNA
ctctcctcaagggaaaggtaaa

SEQ ID NO: 11563 - RNA, 22 nt, synthetic construct
  source 1..22: mol_type = other RNA
ctctccttgggtcgtgggcctg

SEQ ID NO: 11564 - RNA, 22 nt, synthetic construct
  source 1..22: mol_type = other RNA
ctctcgcagagggaggagcgct

SEQ ID NO: 11565 - RNA, 22 nt, synthetic construct
  source 1..22: mol_type = other RNA
ctctcgcgttgccccctgggtg

SEQ ID NO: 11566 - RNA, 22 nt, synthetic construct
  source 1..22: mol_type = other RNA
ctctcgttttctggcttcccac

SEQ ID NO: 11567 - RNA, 22 nt, synthetic construct
  source 1..22: mol_type = other RNA
ctctctccctgggaaaatgggg

SEQ ID NO: 11568 - RNA, 22 nt, synthetic construct
  source 1..22: mol_type = other RNA
ctctctgaggagccggagcgcc

SEQ ID NO: 11569 - RNA, 22 nt, synthetic construct
  source 1..22: mol_type = other RNA
ctctgaggagccggagcgccga

SEQ ID NO: 11570 - RNA, 22 nt, synthetic construct
  source 1..22: mol_type = other RNA
ctctgatcgctctgggggccgc

SEQ ID NO: 11571 - RNA, 22 nt, synthetic construct
  source 1..22: mol_type = other RNA
ctctgcgagagcaatggctccg

SEQ ID NO: 11572 - RNA, 22 nt, synthetic construct
  source 1..22: mol_type = other RNA
ctctgcgtgtaagtcgggaatg

SEQ ID NO: 11573 - RNA, 22 nt, synthetic construct
  source 1..22: mol_type = other RNA
ctctggcgcgggcgtcctccca

SEQ ID NO: 11574 - RNA, 22 nt, synthetic construct
  source 1..22: mol_type = other RNA
ctctggctccccgtggcgtgtg

SEQ ID NO: 11575 - RNA, 22 nt, synthetic construct
  source 1..22: mol_type = other RNA
ctctgggggccgcgatctcccc

SEQ ID NO: 11576 - RNA, 22 nt, synthetic construct
  source 1..22: mol_type = other RNA
ctctggtgggaggggaggtgcg

SEQ ID NO: 11577 - RNA, 22 nt, synthetic construct
  source 1..22: mol_type = other RNA
ctcttaggaggatgctgccact

SEQ ID NO: 11578 - RNA, 22 nt, synthetic construct
  source 1..22: mol_type = other RNA
ctcttcacattcccgacttaca

SEQ ID NO: 11579 - RNA, 22 nt, synthetic construct
  source 1..22: mol_type = other RNA
ctcttcaccccctttcctggga

SEQ ID NO: 11580 - RNA, 22 nt, synthetic construct
  source 1..22: mol_type = other RNA
ctcttctctaggcggccccggc

SEQ ID NO: 11581 - RNA, 22 nt, synthetic construct
  source 1..22: mol_type = other RNA
ctcttgctgccctccgctcgaa

SEQ ID NO: 11582 - RNA, 22 nt, synthetic construct
  source 1..22: mol_type = other RNA
ctcttgtcgccgattggccgtt

SEQ ID NO: 11583 - RNA, 22 nt, synthetic construct
  source 1..22: mol_type = other RNA
ctctttccctctgcgtgtaagt

SEQ ID NO: 11584 - RNA, 22 nt, synthetic construct
  source 1..22: mol_type = other RNA
ctctttcctacactcctcttca

SEQ ID NO: 11585 - RNA, 22 nt, synthetic construct
  source 1..22: mol_type = other RNA
ctcttttctgtcggacccttac

SEQ ID NO: 11586 - RNA, 22 nt, synthetic construct
  source 1..22: mol_type = other RNA
ctgaagggcgagacaagcccga

SEQ ID NO: 11587 - RNA, 22 nt, synthetic construct
  source 1..22: mol_type = other RNA
ctgacaggagctttactccaac

SEQ ID NO: 11588 - RNA, 22 nt, synthetic construct
  source 1..22: mol_type = other RNA
ctgacccaggaaaaacatgaaa

SEQ ID NO: 11589 - RNA, 22 nt, synthetic construct
  source 1..22: mol_type = other RNA
ctgaccctcccctcccgccgca

SEQ ID NO: 11590 - RNA, 22 nt, synthetic construct
  source 1..22: mol_type = other RNA
ctgaccgcacggggattcccag

SEQ ID NO: 11591 - RNA, 22 nt, synthetic construct
  source 1..22: mol_type = other RNA
ctgacgcccaagaagtgagaca

SEQ ID NO: 11592 - RNA, 22 nt, synthetic construct
  source 1..22: mol_type = other RNA
ctgagatagcctcgttgaatgt

SEQ ID NO: 11593 - RNA, 22 nt, synthetic construct
  source 1..22: mol_type = other RNA
ctgaggagccggagcgccgaag

SEQ ID NO: 11594 - RNA, 22 nt, synthetic construct
  source 1..22: mol_type = other RNA
ctgaggtgggaagccagaaaac

SEQ ID NO: 11595 - RNA, 22 nt, synthetic construct
  source 1..22: mol_type = other RNA
ctgatcgctctgggggccgcga

SEQ ID NO: 11596 - RNA, 22 nt, synthetic construct
  source 1..22: mol_type = other RNA
ctgattggcggcgagtgggcca

SEQ ID NO: 11597 - RNA, 22 nt, synthetic construct
  source 1..22: mol_type = other RNA
ctgattggctgtcgaagctgtg

SEQ ID NO: 11598 - RNA, 22 nt, synthetic construct
  source 1..22: mol_type = other RNA
ctgcagcatccatatccaagag

SEQ ID NO: 11599 - RNA, 22 nt, synthetic construct
  source 1..22: mol_type = other RNA
ctgcatccagccacccctttcc

SEQ ID NO: 11600 - RNA, 22 nt, synthetic construct
  source 1..22: mol_type = other RNA
ctgccacgttgcgcaggggcgc

SEQ ID NO: 11601 - RNA, 22 nt, synthetic construct
  source 1..22: mol_type = other RNA
ctgccacttctcacccccctcg

SEQ ID NO: 11602 - RNA, 22 nt, synthetic construct
  source 1..22: mol_type = other RNA
ctgccccccacccccacctcac

SEQ ID NO: 11603 - RNA, 22 nt, synthetic construct
  source 1..22: mol_type = other RNA
ctgcccgagcggaaacgccact

SEQ ID NO: 11604 - RNA, 22 nt, synthetic construct
  source 1..22: mol_type = other RNA
ctgccctccgctcgaaatacac

SEQ ID NO: 11605 - RNA, 22 nt, synthetic construct
  source 1..22: mol_type = other RNA
ctgccggccgagacttctggat

SEQ ID NO: 11606 - RNA, 22 nt, synthetic construct
  source 1..22: mol_type = other RNA
ctgcctactccacgtttacctt

SEQ ID NO: 11607 - RNA, 22 nt, synthetic construct
  source 1..22: mol_type = other RNA
ctgcctttgaagatattctcac

SEQ ID NO: 11608 - RNA, 22 nt, synthetic construct
  source 1..22: mol_type = other RNA
ctgcgagagcaatggctccgtc

SEQ ID NO: 11609 - RNA, 22 nt, synthetic construct
  source 1..22: mol_type = other RNA
ctgcgcaacgtggcaggaagcg

SEQ ID NO: 11610 - RNA, 22 nt, synthetic construct
  source 1..22: mol_type = other RNA
ctgcgctcagagactcacgcag

SEQ ID NO: 11611 - RNA, 22 nt, synthetic construct
  source 1..22: mol_type = other RNA
ctgcggcaaccggagggggagg

SEQ ID NO: 11612 - RNA, 22 nt, synthetic construct
  source 1..22: mol_type = other RNA
ctgcggcgctcggcctcgggga

SEQ ID NO: 11613 - RNA, 22 nt, synthetic construct
  source 1..22: mol_type = other RNA
ctgcggcgggaggggagggtca

SEQ ID NO: 11614 - RNA, 22 nt, synthetic construct
  source 1..22: mol_type = other RNA
ctgcgtactcccgacggcgtaa

SEQ ID NO: 11615 - RNA, 22 nt, synthetic construct
  source 1..22: mol_type = other RNA
ctgcgtgagtctctgagcgcag

SEQ ID NO: 11616 - RNA, 22 nt, synthetic construct
  source 1..22: mol_type = other RNA
ctgcgtgtaagtcgggaatgtg

SEQ ID NO: 11617 - RNA, 22 nt, synthetic construct
  source 1..22: mol_type = other RNA
ctgctacaggcactcgtggggg

SEQ ID NO: 11618 - RNA, 22 nt, synthetic construct
  source 1..22: mol_type = other RNA
ctgcttcccaaaggcattacct

SEQ ID NO: 11619 - RNA, 22 nt, synthetic construct
  source 1..22: mol_type = other RNA
ctgcttgtcttcgacacctgat

SEQ ID NO: 11620 - RNA, 22 nt, synthetic construct
  source 1..22: mol_type = other RNA
ctggacgccttccctctcgttt

SEQ ID NO: 11621 - RNA, 22 nt, synthetic construct
  source 1..22: mol_type = other RNA
ctggagttgagccagattgtgt

SEQ ID NO: 11622 - RNA, 22 nt, synthetic construct
  source 1..22: mol_type = other RNA
ctggatgcaggcgggagggagg

SEQ ID NO: 11623 - RNA, 22 nt, synthetic construct
  source 1..22: mol_type = other RNA
ctggccccgcgcccctgcgcaa

SEQ ID NO: 11624 - RNA, 22 nt, synthetic construct
  source 1..22: mol_type = other RNA
ctggccctccccaagctcttag

SEQ ID NO: 11625 - RNA, 22 nt, synthetic construct
  source 1..22: mol_type = other RNA
ctggccgggaatggcccgtacc

SEQ ID NO: 11626 - RNA, 22 nt, synthetic construct
  source 1..22: mol_type = other RNA
ctggcgccggcgctgggaatcc

SEQ ID NO: 11627 - RNA, 22 nt, synthetic construct
  source 1..22: mol_type = other RNA
ctggcgcgggcgtcctcccacc

SEQ ID NO: 11628 - RNA, 22 nt, synthetic construct
  source 1..22: mol_type = other RNA
ctggcgggactggggctgcgtg

SEQ ID NO: 11629 - RNA, 22 nt, synthetic construct
  source 1..22: mol_type = other RNA
ctggctcaactccaggctcgaa

SEQ ID NO: 11630 - RNA, 22 nt, synthetic construct
  source 1..22: mol_type = other RNA
ctggctccccgtggcgtgtgcc

SEQ ID NO: 11631 - RNA, 22 nt, synthetic construct
  source 1..22: mol_type = other RNA
ctggctcgagtctcacatgagc

SEQ ID NO: 11632 - RNA, 22 nt, synthetic construct
  source 1..22: mol_type = other RNA
ctggcttcccacctcagatggc

SEQ ID NO: 11633 - RNA, 22 nt, synthetic construct
  source 1..22: mol_type = other RNA
ctgggaaaatggggtgttgcaa

SEQ ID NO: 11634 - RNA, 22 nt, synthetic construct
  source 1..22: mol_type = other RNA
ctgggaactgcctactccacgt

SEQ ID NO: 11635 - RNA, 22 nt, synthetic construct
  source 1..22: mol_type = other RNA
ctgggaatccccgtgcggtcag

SEQ ID NO: 11636 - RNA, 22 nt, synthetic construct
  source 1..22: mol_type = other RNA
ctgggacaaggtaagggtccga

SEQ ID NO: 11637 - RNA, 22 nt, synthetic construct
  source 1..22: mol_type = other RNA
ctggggcccgatcgtgaggttc

SEQ ID NO: 11638 - RNA, 22 nt, synthetic construct
  source 1..22: mol_type = other RNA
ctggggctgcgtgagtctctga

SEQ ID NO: 11639 - RNA, 22 nt, synthetic construct
  source 1..22: mol_type = other RNA
ctgggggccgcgatctcccctc

SEQ ID NO: 11640 - RNA, 22 nt, synthetic construct
  source 1..22: mol_type = other RNA
ctggggggatgggtggctaggg

SEQ ID NO: 11641 - RNA, 22 nt, synthetic construct
  source 1..22: mol_type = other RNA
ctgggtcaggacgcttcccctc

SEQ ID NO: 11642 - RNA, 22 nt, synthetic construct
  source 1..22: mol_type = other RNA
ctgggtggggcgggtaggtagg

SEQ ID NO: 11643 - RNA, 22 nt, synthetic construct
  source 1..22: mol_type = other RNA
ctggtggcttgcgggggttgcc

SEQ ID NO: 11644 - RNA, 22 nt, synthetic construct
  source 1..22: mol_type = other RNA
ctggtgggaggggaggtgcggt

SEQ ID NO: 11645 - RNA, 22 nt, synthetic construct
  source 1..22: mol_type = other RNA
ctggttcaagtaggtaaatcgc

SEQ ID NO: 11646 - RNA, 22 nt, synthetic construct
  source 1..22: mol_type = other RNA
ctggttggagtaaagctcctgt

SEQ ID NO: 11647 - RNA, 22 nt, synthetic construct
  source 1..22: mol_type = other RNA
ctgtagcaggtcgggcttgtct

SEQ ID NO: 11648 - RNA, 22 nt, synthetic construct
  source 1..22: mol_type = other RNA
ctgtcacaaggccgcgagaacg

SEQ ID NO: 11649 - RNA, 22 nt, synthetic construct
  source 1..22: mol_type = other RNA
ctgtcagttacgccgtcgggag

SEQ ID NO: 11650 - RNA, 22 nt, synthetic construct
  source 1..22: mol_type = other RNA
ctgtcgaagctgtgggaccggg

SEQ ID NO: 11651 - RNA, 22 nt, synthetic construct
  source 1..22: mol_type = other RNA
ctgtcggacccttaccttgtcc

SEQ ID NO: 11652 - RNA, 22 nt, synthetic construct
  source 1..22: mol_type = other RNA
ctgtgcttcggcgctccggctc

SEQ ID NO: 11653 - RNA, 22 nt, synthetic construct
  source 1..22: mol_type = other RNA
ctgtggcacacgccacggggag

SEQ ID NO: 11654 - RNA, 22 nt, synthetic construct
  source 1..22: mol_type = other RNA
ctgtgggaccgggcccttgcta

SEQ ID NO: 11655 - RNA, 22 nt, synthetic construct
  source 1..22: mol_type = other RNA
ctgtgtatttcgagcggagggc

SEQ ID NO: 11656 - RNA, 22 nt, synthetic construct
  source 1..22: mol_type = other RNA
ctgtgttggcggactggcggga

SEQ ID NO: 11657 - RNA, 22 nt, synthetic construct
  source 1..22: mol_type = other RNA
ctgttgggaaagccccttctat

SEQ ID NO: 11658 - RNA, 22 nt, synthetic construct
  source 1..22: mol_type = other RNA
cttacacgcagagggaaagaga

SEQ ID NO: 11659 - RNA, 22 nt, synthetic construct
  source 1..22: mol_type = other RNA
cttaccttgtcccaggcgctgc

SEQ ID NO: 11660 - RNA, 22 nt, synthetic construct
  source 1..22: mol_type = other RNA
cttagcgactctcgcgttgccc

SEQ ID NO: 11661 - RNA, 22 nt, synthetic construct
  source 1..22: mol_type = other RNA
cttaggaggatgctgccacttc

SEQ ID NO: 11662 - RNA, 22 nt, synthetic construct
  source 1..22: mol_type = other RNA
cttcaaaggcagaaaaatattc

SEQ ID NO: 11663 - RNA, 22 nt, synthetic construct
  source 1..22: mol_type = other RNA
cttcacattcccgacttacacg

SEQ ID NO: 11664 - RNA, 22 nt, synthetic construct
  source 1..22: mol_type = other RNA
cttcaccccctttcctgggaac

SEQ ID NO: 11665 - RNA, 22 nt, synthetic construct
  source 1..22: mol_type = other RNA
cttcaggcggtgggaacccggg

SEQ ID NO: 11666 - RNA, 22 nt, synthetic construct
  source 1..22: mol_type = other RNA
cttcccaaaggcattaccttcg

SEQ ID NO: 11667 - RNA, 22 nt, synthetic construct
  source 1..22: mol_type = other RNA
cttcccacctcagatggctgct

SEQ ID NO: 11668 - RNA, 22 nt, synthetic construct
  source 1..22: mol_type = other RNA
cttcccacgggaaaggcaaccc

SEQ ID NO: 11669 - RNA, 22 nt, synthetic construct
  source 1..22: mol_type = other RNA
cttcccctcccccaacgcctct

SEQ ID NO: 11670 - RNA, 22 nt, synthetic construct
  source 1..22: mol_type = other RNA
cttccctcccctggggcccgat

SEQ ID NO: 11671 - RNA, 22 nt, synthetic construct
  source 1..22: mol_type = other RNA
cttccctctcgttttctggctt

SEQ ID NO: 11672 - RNA, 22 nt, synthetic construct
  source 1..22: mol_type = other RNA
cttccgctgattggcggcgagt

SEQ ID NO: 11673 - RNA, 22 nt, synthetic construct
  source 1..22: mol_type = other RNA
cttccggctagcctcttgtcgc

SEQ ID NO: 11674 - RNA, 22 nt, synthetic construct
  source 1..22: mol_type = other RNA
cttcctgccacgttgcgcaggg

SEQ ID NO: 11675 - RNA, 22 nt, synthetic construct
  source 1..22: mol_type = other RNA
cttcctggacgccttccctctc

SEQ ID NO: 11676 - RNA, 22 nt, synthetic construct
  source 1..22: mol_type = other RNA
cttccttcgggggagtcggttt

SEQ ID NO: 11677 - RNA, 22 nt, synthetic construct
  source 1..22: mol_type = other RNA
cttcgacacctgattggctgtc

SEQ ID NO: 11678 - RNA, 22 nt, synthetic construct
  source 1..22: mol_type = other RNA
cttcgacagccaatcaggtgtc

SEQ ID NO: 11679 - RNA, 22 nt, synthetic construct
  source 1..22: mol_type = other RNA
cttcgccacccccaccacacgt

SEQ ID NO: 11680 - RNA, 22 nt, synthetic construct
  source 1..22: mol_type = other RNA
cttcggcgctccggctcctcag

SEQ ID NO: 11681 - RNA, 22 nt, synthetic construct
  source 1..22: mol_type = other RNA
cttcgggggagtcggtttaccc

SEQ ID NO: 11682 - RNA, 22 nt, synthetic construct
  source 1..22: mol_type = other RNA
cttctatgctaattgattctat

SEQ ID NO: 11683 - RNA, 22 nt, synthetic construct
  source 1..22: mol_type = other RNA
cttctcacccccctcgccgcct

SEQ ID NO: 11684 - RNA, 22 nt, synthetic construct
  source 1..22: mol_type = other RNA
cttctccctccccctccggttg

SEQ ID NO: 11685 - RNA, 22 nt, synthetic construct
  source 1..22: mol_type = other RNA
cttctctaggcggccccggcgg

SEQ ID NO: 11686 - RNA, 22 nt, synthetic construct
  source 1..22: mol_type = other RNA
cttctggatggcggcggccgcg

SEQ ID NO: 11687 - RNA, 22 nt, synthetic construct
  source 1..22: mol_type = other RNA
cttcttgggcgtcagtggtctt

SEQ ID NO: 11688 - RNA, 22 nt, synthetic construct
  source 1..22: mol_type = other RNA
cttgaaccagggctctttccta

SEQ ID NO: 11689 - RNA, 22 nt, synthetic construct
  source 1..22: mol_type = other RNA
cttgaggagaggcctcttgctg

SEQ ID NO: 11690 - RNA, 22 nt, synthetic construct
  source 1..22: mol_type = other RNA
cttgcacacaccgttgcaacac

SEQ ID NO: 11691 - RNA, 22 nt, synthetic construct
  source 1..22: mol_type = other RNA
cttgccttgggcgtggagaacg

SEQ ID NO: 11692 - RNA, 22 nt, synthetic construct
  source 1..22: mol_type = other RNA
cttgcgggggttgcctttcccg

SEQ ID NO: 11693 - RNA, 22 nt, synthetic construct
  source 1..22: mol_type = other RNA
cttgctactggctcgagtctca

SEQ ID NO: 11694 - RNA, 22 nt, synthetic construct
  source 1..22: mol_type = other RNA
cttgctgccctccgctcgaaat

SEQ ID NO: 11695 - RNA, 22 nt, synthetic construct
  source 1..22: mol_type = other RNA
cttgcttgtctcacttcttggg

SEQ ID NO: 11696 - RNA, 22 nt, synthetic construct
  source 1..22: mol_type = other RNA
cttgggcgtcagtggtctttct

SEQ ID NO: 11697 - RNA, 22 nt, synthetic construct
  source 1..22: mol_type = other RNA
cttgggcgtggagaacgatctt

SEQ ID NO: 11698 - RNA, 22 nt, synthetic construct
  source 1..22: mol_type = other RNA
cttggggagggccaggcccacg

SEQ ID NO: 11699 - RNA, 22 nt, synthetic construct
  source 1..22: mol_type = other RNA
cttgggtcgtgggcctggccct

SEQ ID NO: 11700 - RNA, 22 nt, synthetic construct
  source 1..22: mol_type = other RNA
cttgtcccaggcgctgccgggg

SEQ ID NO: 11701 - RNA, 22 nt, synthetic construct
  source 1..22: mol_type = other RNA
cttgtcgccgattggccgtttc

SEQ ID NO: 11702 - RNA, 22 nt, synthetic construct
  source 1..22: mol_type = other RNA
cttgtctcacttcttgggcgtc

SEQ ID NO: 11703 - RNA, 22 nt, synthetic construct
  source 1..22: mol_type = other RNA
cttgtctcgcccttcaggcggt

SEQ ID NO: 11704 - RNA, 22 nt, synthetic construct
  source 1..22: mol_type = other RNA
cttgtcttcgacacctgattgg

SEQ ID NO: 11705 - RNA, 22 nt, synthetic construct
  source 1..22: mol_type = other RNA
cttgtgacagacaactctgatc

SEQ ID NO: 11706 - RNA, 22 nt, synthetic construct
  source 1..22: mol_type = other RNA
cttgtgagaatatcttcaaagg

SEQ ID NO: 11707 - RNA, 22 nt, synthetic construct
  source 1..22: mol_type = other RNA
ctttactccaaccagaatacgc

SEQ ID NO: 11708 - RNA, 22 nt, synthetic construct
  source 1..22: mol_type = other RNA
ctttatgaattctctttccctc

SEQ ID NO: 11709 - RNA, 22 nt, synthetic construct
  source 1..22: mol_type = other RNA
ctttcatgtttttcctgggtca

SEQ ID NO: 11710 - RNA, 22 nt, synthetic construct
  source 1..22: mol_type = other RNA
ctttcccaacagtttaactttc

SEQ ID NO: 11711 - RNA, 22 nt, synthetic construct
  source 1..22: mol_type = other RNA
ctttcccgtgggaagtcgggaa

SEQ ID NO: 11712 - RNA, 22 nt, synthetic construct
  source 1..22: mol_type = other RNA
ctttccctcccaacgtaacaaa

SEQ ID NO: 11713 - RNA, 22 nt, synthetic construct
  source 1..22: mol_type = other RNA
ctttccctctcatgcgatttac

SEQ ID NO: 11714 - RNA, 22 nt, synthetic construct
  source 1..22: mol_type = other RNA
ctttccctctgcgtgtaagtcg

SEQ ID NO: 11715 - RNA, 22 nt, synthetic construct
  source 1..22: mol_type = other RNA
ctttcccttgaggagaggcctc

SEQ ID NO: 11716 - RNA, 22 nt, synthetic construct
  source 1..22: mol_type = other RNA
ctttcctacactcctcttcaca

SEQ ID NO: 11717 - RNA, 22 nt, synthetic construct
  source 1..22: mol_type = other RNA
ctttcctgggaactgcctactc

SEQ ID NO: 11718 - RNA, 22 nt, synthetic construct
  source 1..22: mol_type = other RNA
ctttctgccccccacccccacc

SEQ ID NO: 11719 - RNA, 22 nt, synthetic construct
  source 1..22: mol_type = other RNA
ctttgaagatattctcacaaga

SEQ ID NO: 11720 - RNA, 22 nt, synthetic construct
  source 1..22: mol_type = other RNA
ctttggctcgctccgcctttct

SEQ ID NO: 11721 - RNA, 22 nt, synthetic construct
  source 1..22: mol_type = other RNA
ctttgggaagcagccatctgag

SEQ ID NO: 11722 - RNA, 22 nt, synthetic construct
  source 1..22: mol_type = other RNA
cttttctgtcggacccttacct

SEQ ID NO: 11723 - RNA, 22 nt, synthetic construct
  source 1..22: mol_type = other RNA
gaaaaacatgaaagggggagtt

SEQ ID NO: 11724 - RNA, 22 nt, synthetic construct
  source 1..22: mol_type = other RNA
gaaaaatattccctttatgaat

SEQ ID NO: 11725 - RNA, 22 nt, synthetic construct
  source 1..22: mol_type = other RNA
gaaaacacaaatggcgtattct

SEQ ID NO: 11726 - RNA, 22 nt, synthetic construct
  source 1..22: mol_type = other RNA
gaaaacgagagggaaggcgtcc

SEQ ID NO: 11727 - RNA, 22 nt, synthetic construct
  source 1..22: mol_type = other RNA
gaaaagagaccgaacctcacga

SEQ ID NO: 11728 - RNA, 22 nt, synthetic construct
  source 1..22: mol_type = other RNA
gaaaatgctcgaaaccggacgg

SEQ ID NO: 11729 - RNA, 22 nt, synthetic construct
  source 1..22: mol_type = other RNA
gaaaatggggtgttgcaacggt

SEQ ID NO: 11730 - RNA, 22 nt, synthetic construct
  source 1..22: mol_type = other RNA
gaaaccactgcgcggggcgcgg

SEQ ID NO: 11731 - RNA, 22 nt, synthetic construct
  source 1..22: mol_type = other RNA
gaaaccggacggagccattgct

SEQ ID NO: 11732 - RNA, 22 nt, synthetic construct
  source 1..22: mol_type = other RNA
gaaacgccactgaccgcacggg

SEQ ID NO: 11733 - RNA, 22 nt, synthetic construct
  source 1..22: mol_type = other RNA
gaaacgccgtggcgccgcgttg

SEQ ID NO: 11734 - RNA, 22 nt, synthetic construct
  source 1..22: mol_type = other RNA
gaaacggccaatcggcgacaag

SEQ ID NO: 11735 - RNA, 22 nt, synthetic construct
  source 1..22: mol_type = other RNA
gaaagaccactgacgcccaaga

SEQ ID NO: 11736 - RNA, 22 nt, synthetic construct
  source 1..22: mol_type = other RNA
gaaagagaattcataaagggaa

SEQ ID NO: 11737 - RNA, 22 nt, synthetic construct
  source 1..22: mol_type = other RNA
gaaagagccctggttcaagtag

SEQ ID NO: 11738 - RNA, 22 nt, synthetic construct
  source 1..22: mol_type = other RNA
gaaagaggggggccggcactac

SEQ ID NO: 11739 - RNA, 22 nt, synthetic construct
  source 1..22: mol_type = other RNA
gaaagccccttctatgctaatt

SEQ ID NO: 11740 - RNA, 22 nt, synthetic construct
  source 1..22: mol_type = other RNA
gaaaggcaacccccgcaagcca

SEQ ID NO: 11741 - RNA, 22 nt, synthetic construct
  source 1..22: mol_type = other RNA
gaaaggcggagcgagccaaagg

SEQ ID NO: 11742 - RNA, 22 nt, synthetic construct
  source 1..22: mol_type = other RNA
gaaagggggagttgggtcgcct

SEQ ID NO: 11743 - RNA, 22 nt, synthetic construct
  source 1..22: mol_type = other RNA
gaaagggggtgaagaggcgttg

SEQ ID NO: 11744 - RNA, 22 nt, synthetic construct
  source 1..22: mol_type = other RNA
gaaaggggtggctggatgcagg

SEQ ID NO: 11745 - RNA, 22 nt, synthetic construct
  source 1..22: mol_type = other RNA
gaaaggtaaacgtggagtaggc

SEQ ID NO: 11746 - RNA, 22 nt, synthetic construct
  source 1..22: mol_type = other RNA
gaaagttaaactgttgggaaag

SEQ ID NO: 11747 - RNA, 22 nt, synthetic construct
  source 1..22: mol_type = other RNA
gaaatcggctctggcgcgggcg

SEQ ID NO: 11748 - RNA, 22 nt, synthetic construct
  source 1..22: mol_type = other RNA
gaacataatgtttgttacgttg

SEQ ID NO: 11749 - RNA, 22 nt, synthetic construct
  source 1..22: mol_type = other RNA
gaaccagggctctttcctacac

SEQ ID NO: 11750 - RNA, 22 nt, synthetic construct
  source 1..22: mol_type = other RNA
gaaccctacacattcaacgagg

SEQ ID NO: 11751 - RNA, 22 nt, synthetic construct
  source 1..22: mol_type = other RNA
gaacctcacgatcgggccccag

SEQ ID NO: 11752 - RNA, 22 nt, synthetic construct
  source 1..22: mol_type = other RNA
gaacgatcttgtgagaatatct

SEQ ID NO: 11753 - RNA, 22 nt, synthetic construct
  source 1..22: mol_type = other RNA
gaacgggggtagggagtggggg

SEQ ID NO: 11754 - RNA, 22 nt, synthetic construct
  source 1..22: mol_type = other RNA
gaacgtgtggtgggggtggcga

SEQ ID NO: 11755 - RNA, 22 nt, synthetic construct
  source 1..22: mol_type = other RNA
gaactctggtgggaggggaggt

SEQ ID NO: 11756 - RNA, 22 nt, synthetic construct
  source 1..22: mol_type = other RNA
gaactgcctactccacgtttac

SEQ ID NO: 11757 - RNA, 22 nt, synthetic construct
  source 1..22: mol_type = other RNA
gaagacaagcaggcggcgggta

SEQ ID NO: 11758 - RNA, 22 nt, synthetic construct
  source 1..22: mol_type = other RNA
gaagaggagtgtaggaaagagc

SEQ ID NO: 11759 - RNA, 22 nt, synthetic construct
  source 1..22: mol_type = other RNA
gaagaggcgttgggggagggga

SEQ ID NO: 11760 - RNA, 22 nt, synthetic construct
  source 1..22: mol_type = other RNA
gaagaggctgtgcttcggcgct

SEQ ID NO: 11761 - RNA, 22 nt, synthetic construct
  source 1..22: mol_type = other RNA
gaagatattctcacaagatcgt

SEQ ID NO: 11762 - RNA, 22 nt, synthetic construct
  source 1..22: mol_type = other RNA
gaagattacggaggggagatcg

SEQ ID NO: 11763 - RNA, 22 nt, synthetic construct
  source 1..22: mol_type = other RNA
gaagcacagcctcttctctagg

SEQ ID NO: 11764 - RNA, 22 nt, synthetic construct
  source 1..22: mol_type = other RNA
gaagcagccatctgaggtggga

SEQ ID NO: 11765 - RNA, 22 nt, synthetic construct
  source 1..22: mol_type = other RNA
gaagccagaaaacgagagggaa

SEQ ID NO: 11766 - RNA, 22 nt, synthetic construct
  source 1..22: mol_type = other RNA
gaagccgccggggccgcctaga

SEQ ID NO: 11767 - RNA, 22 nt, synthetic construct
  source 1..22: mol_type = other RNA
gaagcgctcctccctctgcgag

SEQ ID NO: 11768 - RNA, 22 nt, synthetic construct
  source 1..22: mol_type = other RNA
gaagcgtcctgacccaggaaaa

SEQ ID NO: 11769 - RNA, 22 nt, synthetic construct
  source 1..22: mol_type = other RNA
gaagctgtgggaccgggccctt

SEQ ID NO: 11770 - RNA, 22 nt, synthetic construct
  source 1..22: mol_type = other RNA
gaaggaaggggagggtgggagg

SEQ ID NO: 11771 - RNA, 22 nt, synthetic construct
  source 1..22: mol_type = other RNA
gaaggcgtccaggaagattacg

SEQ ID NO: 11772 - RNA, 22 nt, synthetic construct
  source 1..22: mol_type = other RNA
gaagggagcggaaaatgctcga

SEQ ID NO: 11773 - RNA, 22 nt, synthetic construct
  source 1..22: mol_type = other RNA
gaagggcgagacaagcccgacc

SEQ ID NO: 11774 - RNA, 22 nt, synthetic construct
  source 1..22: mol_type = other RNA
gaaggggagggtgggaggacgc

SEQ ID NO: 11775 - RNA, 22 nt, synthetic construct
  source 1..22: mol_type = other RNA
gaaggggctttcccaacagttt

SEQ ID NO: 11776 - RNA, 22 nt, synthetic construct
  source 1..22: mol_type = other RNA
gaagggtcacctcctccgtctc

SEQ ID NO: 11777 - RNA, 22 nt, synthetic construct
  source 1..22: mol_type = other RNA
gaaggtaatgcctttgggaagc

SEQ ID NO: 11778 - RNA, 22 nt, synthetic construct
  source 1..22: mol_type = other RNA
gaagtcgggaacataatgtttg

SEQ ID NO: 11779 - RNA, 22 nt, synthetic construct
  source 1..22: mol_type = other RNA
gaagtctcggccggcagcccgc

SEQ ID NO: 11780 - RNA, 22 nt, synthetic construct
  source 1..22: mol_type = other RNA
gaagtgagacaagcaaggactc

SEQ ID NO: 11781 - RNA, 22 nt, synthetic construct
  source 1..22: mol_type = other RNA
gaagtggcagcatcctcctaag

SEQ ID NO: 11782 - RNA, 22 nt, synthetic construct
  source 1..22: mol_type = other RNA
gaatacgccatttgtgttttca

SEQ ID NO: 11783 - RNA, 22 nt, synthetic construct
  source 1..22: mol_type = other RNA
gaatatcttcaaaggcagaaaa

SEQ ID NO: 11784 - RNA, 22 nt, synthetic construct
  source 1..22: mol_type = other RNA
gaatatttttctgcctttgaag

SEQ ID NO: 11785 - RNA, 22 nt, synthetic construct
  source 1..22: mol_type = other RNA
gaatcaattagcatagaagggg

SEQ ID NO: 11786 - RNA, 22 nt, synthetic construct
  source 1..22: mol_type = other RNA
gaatccccgtgcggtcagtggc

SEQ ID NO: 11787 - RNA, 22 nt, synthetic construct
  source 1..22: mol_type = other RNA
gaatggcccgtacccgtgaggt

SEQ ID NO: 11788 - RNA, 22 nt, synthetic construct
  source 1..22: mol_type = other RNA
gaatgtgaagaggagtgtagga

SEQ ID NO: 11789 - RNA, 22 nt, synthetic construct
  source 1..22: mol_type = other RNA
gaatgtgtagggttcgagcctg

SEQ ID NO: 11790 - RNA, 22 nt, synthetic construct
  source 1..22: mol_type = other RNA
gaattcataaagggaatatttt

SEQ ID NO: 11791 - RNA, 22 nt, synthetic construct
  source 1..22: mol_type = other RNA
gaattctctttccctctgcgtg

SEQ ID NO: 11792 - RNA, 22 nt, synthetic construct
  source 1..22: mol_type = other RNA
gacaactctgatcgctctgggg

SEQ ID NO: 11793 - RNA, 22 nt, synthetic construct
  source 1..22: mol_type = other RNA
gacaagaggctagccggaagcg

SEQ ID NO: 11794 - RNA, 22 nt, synthetic construct
  source 1..22: mol_type = other RNA
gacaagcaaggactctatagaa

SEQ ID NO: 11795 - RNA, 22 nt, synthetic construct
  source 1..22: mol_type = other RNA
gacaagcaggcggcgggtaaac

SEQ ID NO: 11796 - RNA, 22 nt, synthetic construct
  source 1..22: mol_type = other RNA
gacaagcccgacctgctacagg

SEQ ID NO: 11797 - RNA, 22 nt, synthetic construct
  source 1..22: mol_type = other RNA
gacaaggtaagggtccgacaga

SEQ ID NO: 11798 - RNA, 22 nt, synthetic construct
  source 1..22: mol_type = other RNA
gacacaatctggctcaactcca

SEQ ID NO: 11799 - RNA, 22 nt, synthetic construct
  source 1..22: mol_type = other RNA
gacacctgattggctgtcgaag

SEQ ID NO: 11800 - RNA, 22 nt, synthetic construct
  source 1..22: mol_type = other RNA
gacacgccccctcccgccgcgc

SEQ ID NO: 11801 - RNA, 22 nt, synthetic construct
  source 1..22: mol_type = other RNA
gacacgctgtggcacacgccac

SEQ ID NO: 11802 - RNA, 22 nt, synthetic construct
  source 1..22: mol_type = other RNA
gacactgcggcgctcggcctcg

SEQ ID NO: 11803 - RNA, 22 nt, synthetic construct
  source 1..22: mol_type = other RNA
gacagaaaagagaccgaacctc

SEQ ID NO: 11804 - RNA, 22 nt, synthetic construct
  source 1..22: mol_type = other RNA
gacagacaactctgatcgctct

SEQ ID NO: 11805 - RNA, 22 nt, synthetic construct
  source 1..22: mol_type = other RNA
gacagccaatcaggtgtcgaag

SEQ ID NO: 11806 - RNA, 22 nt, synthetic construct
  source 1..22: mol_type = other RNA
gacaggagctttactccaacca

SEQ ID NO: 11807 - RNA, 22 nt, synthetic construct
  source 1..22: mol_type = other RNA
gaccactgacgcccaagaagtg

SEQ ID NO: 11808 - RNA, 22 nt, synthetic construct
  source 1..22: mol_type = other RNA
gacccaactccccctttcatgt

SEQ ID NO: 11809 - RNA, 22 nt, synthetic construct
  source 1..22: mol_type = other RNA
gacccaaggagagcgagcgcgg

SEQ ID NO: 11810 - RNA, 22 nt, synthetic construct
  source 1..22: mol_type = other RNA
gacccaggaaaaacatgaaagg

SEQ ID NO: 11811 - RNA, 22 nt, synthetic construct
  source 1..22: mol_type = other RNA
gacccccgctcctcccccaccc

SEQ ID NO: 11812 - RNA, 22 nt, synthetic construct
  source 1..22: mol_type = other RNA
gacccttaccttgtcccaggcg

SEQ ID NO: 11813 - RNA, 22 nt, synthetic construct
  source 1..22: mol_type = other RNA
gacccttccctcccctggggcc

SEQ ID NO: 11814 - RNA, 22 nt, synthetic construct
  source 1..22: mol_type = other RNA
gaccgaacctcacgatcgggcc

SEQ ID NO: 11815 - RNA, 22 nt, synthetic construct
  source 1..22: mol_type = other RNA
gaccgacccccgctcctccccc

SEQ ID NO: 11816 - RNA, 22 nt, synthetic construct
  source 1..22: mol_type = other RNA
gaccgcacggggattcccagcg

SEQ ID NO: 11817 - RNA, 22 nt, synthetic construct
  source 1..22: mol_type = other RNA
gaccgggcccttgctactggct

SEQ ID NO: 11818 - RNA, 22 nt, synthetic construct
  source 1..22: mol_type = other RNA
gaccgtaccaacgcccgcctcc

SEQ ID NO: 11819 - RNA, 22 nt, synthetic construct
  source 1..22: mol_type = other RNA
gacctgctacaggcactcgtgg

SEQ ID NO: 11820 - RNA, 22 nt, synthetic construct
  source 1..22: mol_type = other RNA
gacgcccaagaagtgagacaag

SEQ ID NO: 11821 - RNA, 22 nt, synthetic construct
  source 1..22: mol_type = other RNA
gacgcccgcgccagagccgatt

SEQ ID NO: 11822 - RNA, 22 nt, synthetic construct
  source 1..22: mol_type = other RNA
gacgccttccctctcgttttct

SEQ ID NO: 11823 - RNA, 22 nt, synthetic construct
  source 1..22: mol_type = other RNA
gacgcttcccctcccccaacgc

SEQ ID NO: 11824 - RNA, 22 nt, synthetic construct
  source 1..22: mol_type = other RNA
gacggagccattgctctcgcag

SEQ ID NO: 11825 - RNA, 22 nt, synthetic construct
  source 1..22: mol_type = other RNA
gacggaggaggtgacccttccc

SEQ ID NO: 11826 - RNA, 22 nt, synthetic construct
  source 1..22: mol_type = other RNA
gacggcccccctagccacccat

SEQ ID NO: 11827 - RNA, 22 nt, synthetic construct
  source 1..22: mol_type = other RNA
gacggcgtaactgacaggagct

SEQ ID NO: 11828 - RNA, 22 nt, synthetic construct
  source 1..22: mol_type = other RNA
gactcacgcagccccagtcccg

SEQ ID NO: 11829 - RNA, 22 nt, synthetic construct
  source 1..22: mol_type = other RNA
gactcccccgaaggaaggggag

SEQ ID NO: 11830 - RNA, 22 nt, synthetic construct
  source 1..22: mol_type = other RNA
gactcgagccagtagcaagggc

SEQ ID NO: 11831 - RNA, 22 nt, synthetic construct
  source 1..22: mol_type = other RNA
gactcgagttaggcccaacgcg

SEQ ID NO: 11832 - RNA, 22 nt, synthetic construct
  source 1..22: mol_type = other RNA
gactctatagaatcaattagca

SEQ ID NO: 11833 - RNA, 22 nt, synthetic construct
  source 1..22: mol_type = other RNA
gactctcgcgttgccccctggg

SEQ ID NO: 11834 - RNA, 22 nt, synthetic construct
  source 1..22: mol_type = other RNA
gactgcagcatccatatccaag

SEQ ID NO: 11835 - RNA, 22 nt, synthetic construct
  source 1..22: mol_type = other RNA
gactggcgggactggggctgcg

SEQ ID NO: 11836 - RNA, 22 nt, synthetic construct
  source 1..22: mol_type = other RNA
gactggggctgcgtgagtctct

SEQ ID NO: 11837 - RNA, 22 nt, synthetic construct
  source 1..22: mol_type = other RNA
gacttacacgcagagggaaaga

SEQ ID NO: 11838 - RNA, 22 nt, synthetic construct
  source 1..22: mol_type = other RNA
gacttcccacgggaaaggcaac

SEQ ID NO: 11839 - RNA, 22 nt, synthetic construct
  source 1..22: mol_type = other RNA
gacttctggatggcggcggccg

SEQ ID NO: 11840 - RNA, 22 nt, synthetic construct
  source 1..22: mol_type = other RNA
gagaaacggccaatcggcgaca

SEQ ID NO: 11841 - RNA, 22 nt, synthetic construct
  source 1..22: mol_type = other RNA
gagaaagaccactgacgcccaa

SEQ ID NO: 11842 - RNA, 22 nt, synthetic construct
  source 1..22: mol_type = other RNA
gagaacgatcttgtgagaatat

SEQ ID NO: 11843 - RNA, 22 nt, synthetic construct
  source 1..22: mol_type = other RNA
gagaacgggggtagggagtggg

SEQ ID NO: 11844 - RNA, 22 nt, synthetic construct
  source 1..22: mol_type = other RNA
gagaacgtgtggtgggggtggc

SEQ ID NO: 11845 - RNA, 22 nt, synthetic construct
  source 1..22: mol_type = other RNA
gagaagaggctgtgcttcggcg

SEQ ID NO: 11846 - RNA, 22 nt, synthetic construct
  source 1..22: mol_type = other RNA
gagaagggagcggaaaatgctc

SEQ ID NO: 11847 - RNA, 22 nt, synthetic construct
  source 1..22: mol_type = other RNA
gagaagtggcagcatcctccta

SEQ ID NO: 11848 - RNA, 22 nt, synthetic construct
  source 1..22: mol_type = other RNA
gagaatatcttcaaaggcagaa

SEQ ID NO: 11849 - RNA, 22 nt, synthetic construct
  source 1..22: mol_type = other RNA
gagaattcataaagggaatatt

SEQ ID NO: 11850 - RNA, 22 nt, synthetic construct
  source 1..22: mol_type = other RNA
gagacaagcaaggactctatag

SEQ ID NO: 11851 - RNA, 22 nt, synthetic construct
  source 1..22: mol_type = other RNA
gagacaagcccgacctgctaca

SEQ ID NO: 11852 - RNA, 22 nt, synthetic construct
  source 1..22: mol_type = other RNA
gagaccgaacctcacgatcggg

SEQ ID NO: 11853 - RNA, 22 nt, synthetic construct
  source 1..22: mol_type = other RNA
gagacggaggaggtgacccttc

SEQ ID NO: 11854 - RNA, 22 nt, synthetic construct
  source 1..22: mol_type = other RNA
gagactcacgcagccccagtcc

SEQ ID NO: 11855 - RNA, 22 nt, synthetic construct
  source 1..22: mol_type = other RNA
gagactcgagccagtagcaagg

SEQ ID NO: 11856 - RNA, 22 nt, synthetic construct
  source 1..22: mol_type = other RNA
gagacttctggatggcggcggc

SEQ ID NO: 11857 - RNA, 22 nt, synthetic construct
  source 1..22: mol_type = other RNA
gagagagatccccctctaatct

SEQ ID NO: 11858 - RNA, 22 nt, synthetic construct
  source 1..22: mol_type = other RNA
gagagatccccctctaatctag

SEQ ID NO: 11859 - RNA, 22 nt, synthetic construct
  source 1..22: mol_type = other RNA
gagagcaatggctccgtccggt

SEQ ID NO: 11860 - RNA, 22 nt, synthetic construct
  source 1..22: mol_type = other RNA
gagagcctcggctaggtagggg

SEQ ID NO: 11861 - RNA, 22 nt, synthetic construct
  source 1..22: mol_type = other RNA
gagagcgagcgcggggagacgg

SEQ ID NO: 11862 - RNA, 22 nt, synthetic construct
  source 1..22: mol_type = other RNA
gagaggccaatggcgcggcggg

SEQ ID NO: 11863 - RNA, 22 nt, synthetic construct
  source 1..22: mol_type = other RNA
gagaggcctcttgctgccctcc

SEQ ID NO: 11864 - RNA, 22 nt, synthetic construct
  source 1..22: mol_type = other RNA
gagagggaaagttaaactgttg

SEQ ID NO: 11865 - RNA, 22 nt, synthetic construct
  source 1..22: mol_type = other RNA
gagagggaaggcgtccaggaag

SEQ ID NO: 11866 - RNA, 22 nt, synthetic construct
  source 1..22: mol_type = other RNA
gagagtcgctaagcggctgcgt

SEQ ID NO: 11867 - RNA, 22 nt, synthetic construct
  source 1..22: mol_type = other RNA
gagatagcctcgttgaatgtgt

SEQ ID NO: 11868 - RNA, 22 nt, synthetic construct
  source 1..22: mol_type = other RNA
gagatccccctctaatctaggc

SEQ ID NO: 11869 - RNA, 22 nt, synthetic construct
  source 1..22: mol_type = other RNA
gagatcgcggcccccagagcga

SEQ ID NO: 11870 - RNA, 22 nt, synthetic construct
  source 1..22: mol_type = other RNA
gagatgctgggtgtgcgggcgc

SEQ ID NO: 11871 - RNA, 22 nt, synthetic construct
  source 1..22: mol_type = other RNA
gagcaatggctccgtccggttt

SEQ ID NO: 11872 - RNA, 22 nt, synthetic construct
  source 1..22: mol_type = other RNA
gagcattttccgctcccttctc

SEQ ID NO: 11873 - RNA, 22 nt, synthetic construct
  source 1..22: mol_type = other RNA
gagccagagaacgtgtggtggg

SEQ ID NO: 11874 - RNA, 22 nt, synthetic construct
  source 1..22: mol_type = other RNA
gagccagattgtgtcgttttac

SEQ ID NO: 11875 - RNA, 22 nt, synthetic construct
  source 1..22: mol_type = other RNA
gagccagtagcaagggcccggt

SEQ ID NO: 11876 - RNA, 22 nt, synthetic construct
  source 1..22: mol_type = other RNA
gagccattgctctcgcagaggg

SEQ ID NO: 11877 - RNA, 22 nt, synthetic construct
  source 1..22: mol_type = other RNA
gagccctggttcaagtaggtaa

SEQ ID NO: 11878 - RNA, 22 nt, synthetic construct
  source 1..22: mol_type = other RNA
gagccgatttcactgaccctcc

SEQ ID NO: 11879 - RNA, 22 nt, synthetic construct
  source 1..22: mol_type = other RNA
gagccgcggccgccgccatcca

SEQ ID NO: 11880 - RNA, 22 nt, synthetic construct
  source 1..22: mol_type = other RNA
gagccggagcgccgaagcacag

SEQ ID NO: 11881 - RNA, 22 nt, synthetic construct
  source 1..22: mol_type = other RNA
gagcctcggctaggtaggggag

SEQ ID NO: 11882 - RNA, 22 nt, synthetic construct
  source 1..22: mol_type = other RNA
gagcctggagttgagccagatt

SEQ ID NO: 11883 - RNA, 22 nt, synthetic construct
  source 1..22: mol_type = other RNA
gagcgaaaccactgcgcggggc

SEQ ID NO: 11884 - RNA, 22 nt, synthetic construct
  source 1..22: mol_type = other RNA
gagcgagcgcggggagacggag

SEQ ID NO: 11885 - RNA, 22 nt, synthetic construct
  source 1..22: mol_type = other RNA
gagcgatcagagttgtctgtca

SEQ ID NO: 11886 - RNA, 22 nt, synthetic construct
  source 1..22: mol_type = other RNA
gagcgccgaagcacagcctctt

SEQ ID NO: 11887 - RNA, 22 nt, synthetic construct
  source 1..22: mol_type = other RNA
gagcgccgcagtgtctggcccc

SEQ ID NO: 11888 - RNA, 22 nt, synthetic construct
  source 1..22: mol_type = other RNA
gagcgcggggagacggaggagg

SEQ ID NO: 11889 - RNA, 22 nt, synthetic construct
  source 1..22: mol_type = other RNA
gagcgcttccggctagcctctt

SEQ ID NO: 11890 - RNA, 22 nt, synthetic construct
  source 1..22: mol_type = other RNA
gagcggaaaatgctcgaaaccg

SEQ ID NO: 11891 - RNA, 22 nt, synthetic construct
  source 1..22: mol_type = other RNA
gagcggaaacgccactgaccgc

SEQ ID NO: 11892 - RNA, 22 nt, synthetic construct
  source 1..22: mol_type = other RNA
gagcggaactctggtgggaggg

SEQ ID NO: 11893 - RNA, 22 nt, synthetic construct
  source 1..22: mol_type = other RNA
gagcggagggcagcaagaggcc

SEQ ID NO: 11894 - RNA, 22 nt, synthetic construct
  source 1..22: mol_type = other RNA
gagcttggggagggccaggccc

SEQ ID NO: 11895 - RNA, 22 nt, synthetic construct
  source 1..22: mol_type = other RNA
gagctttactccaaccagaata

SEQ ID NO: 11896 - RNA, 22 nt, synthetic construct
  source 1..22: mol_type = other RNA
gaggaccgtaccaacgcccgcc

SEQ ID NO: 11897 - RNA, 22 nt, synthetic construct
  source 1..22: mol_type = other RNA
gaggacgcccgcgccagagccg

SEQ ID NO: 11898 - RNA, 22 nt, synthetic construct
  source 1..22: mol_type = other RNA
gaggagaaacggccaatcggcg

SEQ ID NO: 11899 - RNA, 22 nt, synthetic construct
  source 1..22: mol_type = other RNA
gaggagaggcctcttgctgccc

SEQ ID NO: 11900 - RNA, 22 nt, synthetic construct
  source 1..22: mol_type = other RNA
gaggagccggagcgccgaagca

SEQ ID NO: 11901 - RNA, 22 nt, synthetic construct
  source 1..22: mol_type = other RNA
gaggagcgcttccggctagcct

SEQ ID NO: 11902 - RNA, 22 nt, synthetic construct
  source 1..22: mol_type = other RNA
gaggaggtgacccttccctccc

SEQ ID NO: 11903 - RNA, 22 nt, synthetic construct
  source 1..22: mol_type = other RNA
gaggagtgtaggaaagagccct

SEQ ID NO: 11904 - RNA, 22 nt, synthetic construct
  source 1..22: mol_type = other RNA
gaggatgctgccacttctcacc

SEQ ID NO: 11905 - RNA, 22 nt, synthetic construct
  source 1..22: mol_type = other RNA
gaggccaatggcgcggcgggag

SEQ ID NO: 11906 - RNA, 22 nt, synthetic construct
  source 1..22: mol_type = other RNA
gaggcccgccctgcggcaaccg

SEQ ID NO: 11907 - RNA, 22 nt, synthetic construct
  source 1..22: mol_type = other RNA
gaggccgagcgccgcagtgtct

SEQ ID NO: 11908 - RNA, 22 nt, synthetic construct
  source 1..22: mol_type = other RNA
gaggccggccgcgcccgcacac

SEQ ID NO: 11909 - RNA, 22 nt, synthetic construct
  source 1..22: mol_type = other RNA
gaggcctctcctcaagggaaag

SEQ ID NO: 11910 - RNA, 22 nt, synthetic construct
  source 1..22: mol_type = other RNA
gaggcctcttgctgccctccgc

SEQ ID NO: 11911 - RNA, 22 nt, synthetic construct
  source 1..22: mol_type = other RNA
gaggcggcaggactcgagttag

SEQ ID NO: 11912 - RNA, 22 nt, synthetic construct
  source 1..22: mol_type = other RNA
gaggcgggcgttggtacggtcc

SEQ ID NO: 11913 - RNA, 22 nt, synthetic construct
  source 1..22: mol_type = other RNA
gaggcgggggcgggctgccggc

SEQ ID NO: 11914 - RNA, 22 nt, synthetic construct
  source 1..22: mol_type = other RNA
gaggcgttgggggaggggaagc

SEQ ID NO: 11915 - RNA, 22 nt, synthetic construct
  source 1..22: mol_type = other RNA
gaggctagccggaagcgctcct

SEQ ID NO: 11916 - RNA, 22 nt, synthetic construct
  source 1..22: mol_type = other RNA
gaggctatctcagacacgctgt

SEQ ID NO: 11917 - RNA, 22 nt, synthetic construct
  source 1..22: mol_type = other RNA
gaggctctctgaggagccggag

SEQ ID NO: 11918 - RNA, 22 nt, synthetic construct
  source 1..22: mol_type = other RNA
gaggctgtgcttcggcgctccg

SEQ ID NO: 11919 - RNA, 22 nt, synthetic construct
  source 1..22: mol_type = other RNA
gagggaaagagaattcataaag

SEQ ID NO: 11920 - RNA, 22 nt, synthetic construct
  source 1..22: mol_type = other RNA
gagggaaaggggtggctggatg

SEQ ID NO: 11921 - RNA, 22 nt, synthetic construct
  source 1..22: mol_type = other RNA
gagggaaagttaaactgttggg

SEQ ID NO: 11922 - RNA, 22 nt, synthetic construct
  source 1..22: mol_type = other RNA
gagggaaggcgtccaggaagat

SEQ ID NO: 11923 - RNA, 22 nt, synthetic construct
  source 1..22: mol_type = other RNA
gagggaagggtcacctcctccg

SEQ ID NO: 11924 - RNA, 22 nt, synthetic construct
  source 1..22: mol_type = other RNA
gagggagaagggagcggaaaat

SEQ ID NO: 11925 - RNA, 22 nt, synthetic construct
  source 1..22: mol_type = other RNA
gagggaggagcgcttccggcta

SEQ ID NO: 11926 - RNA, 22 nt, synthetic construct
  source 1..22: mol_type = other RNA
gagggaggcccgccctgcggca

SEQ ID NO: 11927 - RNA, 22 nt, synthetic construct
  source 1..22: mol_type = other RNA
gagggcagcaagaggcctctcc

SEQ ID NO: 11928 - RNA, 22 nt, synthetic construct
  source 1..22: mol_type = other RNA
gagggccaggcccacgacccaa

SEQ ID NO: 11929 - RNA, 22 nt, synthetic construct
  source 1..22: mol_type = other RNA
gaggggaagcgtcctgacccag

SEQ ID NO: 11930 - RNA, 22 nt, synthetic construct
  source 1..22: mol_type = other RNA
gaggggagatcgcggcccccag

SEQ ID NO: 11931 - RNA, 22 nt, synthetic construct
  source 1..22: mol_type = other RNA
gaggggagggtcagtgaaatcg

SEQ ID NO: 11932 - RNA, 22 nt, synthetic construct
  source 1..22: mol_type = other RNA
gaggggaggtgcggtacactgg

SEQ ID NO: 11933 - RNA, 22 nt, synthetic construct
  source 1..22: mol_type = other RNA
gagggggagggagaagggagcg

SEQ ID NO: 11934 - RNA, 22 nt, synthetic construct
  source 1..22: mol_type = other RNA
gagggggatctctctccctggg

SEQ ID NO: 11935 - RNA, 22 nt, synthetic construct
  source 1..22: mol_type = other RNA
gaggggggccggcactactgtg

SEQ ID NO: 11936 - RNA, 22 nt, synthetic construct
  source 1..22: mol_type = other RNA
gaggggggtgagaagtggcagc

SEQ ID NO: 11937 - RNA, 22 nt, synthetic construct
  source 1..22: mol_type = other RNA
gagggtcagtgaaatcggctct

SEQ ID NO: 11938 - RNA, 22 nt, synthetic construct
  source 1..22: mol_type = other RNA
gagggtgggaggacgcccgcgc

SEQ ID NO: 11939 - RNA, 22 nt, synthetic construct
  source 1..22: mol_type = other RNA
gaggtgacccttccctcccctg

SEQ ID NO: 11940 - RNA, 22 nt, synthetic construct
  source 1..22: mol_type = other RNA
gaggtgcggtacactgggggga

SEQ ID NO: 11941 - RNA, 22 nt, synthetic construct
  source 1..22: mol_type = other RNA
gaggtgggaagccagaaaacga

SEQ ID NO: 11942 - RNA, 22 nt, synthetic construct
  source 1..22: mol_type = other RNA
gaggtgggggtggggggcagaa

SEQ ID NO: 11943 - RNA, 22 nt, synthetic construct
  source 1..22: mol_type = other RNA
gaggttcggtctcttttctgtc

SEQ ID NO: 11944 - RNA, 22 nt, synthetic construct
  source 1..22: mol_type = other RNA
gagtaaagctcctgtcagttac

SEQ ID NO: 11945 - RNA, 22 nt, synthetic construct
  source 1..22: mol_type = other RNA
gagtacgcagccgcttagcgac

SEQ ID NO: 11946 - RNA, 22 nt, synthetic construct
  source 1..22: mol_type = other RNA
gagtaggcagttcccaggaaag

SEQ ID NO: 11947 - RNA, 22 nt, synthetic construct
  source 1..22: mol_type = other RNA
gagtcctgccgcctcccgggag

SEQ ID NO: 11948 - RNA, 22 nt, synthetic construct
  source 1..22: mol_type = other RNA
gagtccttgcttgtctcacttc

SEQ ID NO: 11949 - RNA, 22 nt, synthetic construct
  source 1..22: mol_type = other RNA
gagtcgctaagcggctgcgtac

SEQ ID NO: 11950 - RNA, 22 nt, synthetic construct
  source 1..22: mol_type = other RNA
gagtcggtttacccgccgcctg

SEQ ID NO: 11951 - RNA, 22 nt, synthetic construct
  source 1..22: mol_type = other RNA
gagtctcacatgagcgaaacca

SEQ ID NO: 11952 - RNA, 22 nt, synthetic construct
  source 1..22: mol_type = other RNA
gagtctctgagcgcaggcgggc

SEQ ID NO: 11953 - RNA, 22 nt, synthetic construct
  source 1..22: mol_type = other RNA
gagtgcctgtagcaggtcgggc

SEQ ID NO: 11954 - RNA, 22 nt, synthetic construct
  source 1..22: mol_type = other RNA
gagtgggccaatgggtgcgggg

SEQ ID NO: 11955 - RNA, 22 nt, synthetic construct
  source 1..22: mol_type = other RNA
gagtgtaggaaagagccctggt

SEQ ID NO: 11956 - RNA, 22 nt, synthetic construct
  source 1..22: mol_type = other RNA
gagttaggcccaacgcggcgcc

SEQ ID NO: 11957 - RNA, 22 nt, synthetic construct
  source 1..22: mol_type = other RNA
gagttccgctcccctacctagc

SEQ ID NO: 11958 - RNA, 22 nt, synthetic construct
  source 1..22: mol_type = other RNA
gagttgagccagattgtgtcgt

SEQ ID NO: 11959 - RNA, 22 nt, synthetic construct
  source 1..22: mol_type = other RNA
gagttgggtcgcctagattaga

SEQ ID NO: 11960 - RNA, 22 nt, synthetic construct
  source 1..22: mol_type = other RNA
gagttgtctgtcacaaggccgc

SEQ ID NO: 11961 - RNA, 22 nt, synthetic construct
  source 1..22: mol_type = other RNA
gatagcctcgttgaatgtgtag

SEQ ID NO: 11962 - RNA, 22 nt, synthetic construct
  source 1..22: mol_type = other RNA
gatattctcacaagatcgttct

SEQ ID NO: 11963 - RNA, 22 nt, synthetic construct
  source 1..22: mol_type = other RNA
gatcagagttgtctgtcacaag

SEQ ID NO: 11964 - RNA, 22 nt, synthetic construct
  source 1..22: mol_type = other RNA
gatcccccactccctacccccg

SEQ ID NO: 11965 - RNA, 22 nt, synthetic construct
  source 1..22: mol_type = other RNA
gatccccctctaatctaggcga

SEQ ID NO: 11966 - RNA, 22 nt, synthetic construct
  source 1..22: mol_type = other RNA
gatcgcggcccccagagcgatc

SEQ ID NO: 11967 - RNA, 22 nt, synthetic construct
  source 1..22: mol_type = other RNA
gatcgctctgggggccgcgatc

SEQ ID NO: 11968 - RNA, 22 nt, synthetic construct
  source 1..22: mol_type = other RNA
gatcgggccccaggggagggaa

SEQ ID NO: 11969 - RNA, 22 nt, synthetic construct
  source 1..22: mol_type = other RNA
gatcgtgaggttcggtctcttt

SEQ ID NO: 11970 - RNA, 22 nt, synthetic construct
  source 1..22: mol_type = other RNA
gatcgttctccacgcccaaggc

SEQ ID NO: 11971 - RNA, 22 nt, synthetic construct
  source 1..22: mol_type = other RNA
gatctcccctccgtaatcttcc

SEQ ID NO: 11972 - RNA, 22 nt, synthetic construct
  source 1..22: mol_type = other RNA
gatctctctccctgggaaaatg

SEQ ID NO: 11973 - RNA, 22 nt, synthetic construct
  source 1..22: mol_type = other RNA
gatcttgtgagaatatcttcaa

SEQ ID NO: 11974 - RNA, 22 nt, synthetic construct
  source 1..22: mol_type = other RNA
gatgcaggcgggagggaggccc

SEQ ID NO: 11975 - RNA, 22 nt, synthetic construct
  source 1..22: mol_type = other RNA
gatgctgccacttctcaccccc

SEQ ID NO: 11976 - RNA, 22 nt, synthetic construct
  source 1..22: mol_type = other RNA
gatgctgggtgtgcgggcgcgg

SEQ ID NO: 11977 - RNA, 22 nt, synthetic construct
  source 1..22: mol_type = other RNA
gatggctgcttcccaaaggcat

SEQ ID NO: 11978 - RNA, 22 nt, synthetic construct
  source 1..22: mol_type = other RNA
gatgggtggctaggggggccgt

SEQ ID NO: 11979 - RNA, 22 nt, synthetic construct
  source 1..22: mol_type = other RNA
gattacggaggggagatcgcgg

SEQ ID NO: 11980 - RNA, 22 nt, synthetic construct
  source 1..22: mol_type = other RNA
gattagagggggatctctctcc

SEQ ID NO: 11981 - RNA, 22 nt, synthetic construct
  source 1..22: mol_type = other RNA
gattcccagcgccggcgccagg

SEQ ID NO: 11982 - RNA, 22 nt, synthetic construct
  source 1..22: mol_type = other RNA
gattctatagagtccttgcttg

SEQ ID NO: 11983 - RNA, 22 nt, synthetic construct
  source 1..22: mol_type = other RNA
gattggccgtttctcctcccgc

SEQ ID NO: 11984 - RNA, 22 nt, synthetic construct
  source 1..22: mol_type = other RNA
gattggcggcgagtgggccaat

SEQ ID NO: 11985 - RNA, 22 nt, synthetic construct
  source 1..22: mol_type = other RNA
gattggctgtcgaagctgtggg

SEQ ID NO: 11986 - RNA, 22 nt, synthetic construct
  source 1..22: mol_type = other RNA
gattgtgtcgttttacttgcct

SEQ ID NO: 11987 - RNA, 22 nt, synthetic construct
  source 1..22: mol_type = other RNA
gatttacctacttgaaccaggg

SEQ ID NO: 11988 - RNA, 22 nt, synthetic construct
  source 1..22: mol_type = other RNA
gatttcactgaccctcccctcc

SEQ ID NO: 11989 - RNA, 22 nt, synthetic construct
  source 1..22: mol_type = other RNA
gcaacaccccattttcccaggg

SEQ ID NO: 11990 - RNA, 22 nt, synthetic construct
  source 1..22: mol_type = other RNA
gcaacccccgcaagccaccaga

SEQ ID NO: 11991 - RNA, 22 nt, synthetic construct
  source 1..22: mol_type = other RNA
gcaaccggagggggagggagaa

SEQ ID NO: 11992 - RNA, 22 nt, synthetic construct
  source 1..22: mol_type = other RNA
gcaacgcgagagtcgctaagcg

SEQ ID NO: 11993 - RNA, 22 nt, synthetic construct
  source 1..22: mol_type = other RNA
gcaacggtgtgtgcaaggcggc

SEQ ID NO: 11994 - RNA, 22 nt, synthetic construct
  source 1..22: mol_type = other RNA
gcaacgtggcaggaagcgcgcg

SEQ ID NO: 11995 - RNA, 22 nt, synthetic construct
  source 1..22: mol_type = other RNA
gcaagaggcctctcctcaaggg

SEQ ID NO: 11996 - RNA, 22 nt, synthetic construct
  source 1..22: mol_type = other RNA
gcaagccaccagacggcccccc

SEQ ID NO: 11997 - RNA, 22 nt, synthetic construct
  source 1..22: mol_type = other RNA
gcaaggactctatagaatcaat

SEQ ID NO: 11998 - RNA, 22 nt, synthetic construct
  source 1..22: mol_type = other RNA
gcaaggcggcgaggggggtgag

SEQ ID NO: 11999 - RNA, 22 nt, synthetic construct
  source 1..22: mol_type = other RNA
gcaagggcccggtcccacagct

SEQ ID NO: 12000 - RNA, 22 nt, synthetic construct
  source 1..22: mol_type = other RNA
gcaagtaaaacgacacaatctg

SEQ ID NO: 12001 - RNA, 22 nt, synthetic construct
  source 1..22: mol_type = other RNA
gcaatggctccgtccggtttcg

SEQ ID NO: 12002 - RNA, 22 nt, synthetic construct
  source 1..22: mol_type = other RNA
gcacacaccgttgcaacacccc

SEQ ID NO: 12003 - RNA, 22 nt, synthetic construct
  source 1..22: mol_type = other RNA
gcacacccagcatctctacacc

SEQ ID NO: 12004 - RNA, 22 nt, synthetic construct
  source 1..22: mol_type = other RNA
gcacacgccacggggagccaga

SEQ ID NO: 12005 - RNA, 22 nt, synthetic construct
  source 1..22: mol_type = other RNA
gcacagcctcttctctaggcgg

SEQ ID NO: 12006 - RNA, 22 nt, synthetic construct
  source 1..22: mol_type = other RNA
gcacccattggcccactcgccg

SEQ ID NO: 12007 - RNA, 22 nt, synthetic construct
  source 1..22: mol_type = other RNA
gcacctcccctcccaccagagt

SEQ ID NO: 12008 - RNA, 22 nt, synthetic construct
  source 1..22: mol_type = other RNA
gcacggcactcccgggaggcgg

SEQ ID NO: 12009 - RNA, 22 nt, synthetic construct
  source 1..22: mol_type = other RNA
gcacggggattcccagcgccgg

SEQ ID NO: 12010 - RNA, 22 nt, synthetic construct
  source 1..22: mol_type = other RNA
gcactactgtgttggcggactg

SEQ ID NO: 12011 - RNA, 22 nt, synthetic construct
  source 1..22: mol_type = other RNA
gcactcccgggaggcggcagga

SEQ ID NO: 12012 - RNA, 22 nt, synthetic construct
  source 1..22: mol_type = other RNA
gcactcgtgggggtgggggagg

SEQ ID NO: 12013 - RNA, 22 nt, synthetic construct
  source 1..22: mol_type = other RNA
gcagaaaaatattccctttatg

SEQ ID NO: 12014 - RNA, 22 nt, synthetic construct
  source 1..22: mol_type = other RNA
gcagaaaggcggagcgagccaa

SEQ ID NO: 12015 - RNA, 22 nt, synthetic construct
  source 1..22: mol_type = other RNA
gcagagggaaagagaattcata

SEQ ID NO: 12016 - RNA, 22 nt, synthetic construct
  source 1..22: mol_type = other RNA
gcagagggaggagcgcttccgg

SEQ ID NO: 12017 - RNA, 22 nt, synthetic construct
  source 1..22: mol_type = other RNA
gcagcaagaggcctctcctcaa

SEQ ID NO: 12018 - RNA, 22 nt, synthetic construct
  source 1..22: mol_type = other RNA
gcagcatccatatccaagagaa

SEQ ID NO: 12019 - RNA, 22 nt, synthetic construct
  source 1..22: mol_type = other RNA
gcagcatcctcctaagagcttg

SEQ ID NO: 12020 - RNA, 22 nt, synthetic construct
  source 1..22: mol_type = other RNA
gcagccatctgaggtgggaagc

SEQ ID NO: 12021 - RNA, 22 nt, synthetic construct
  source 1..22: mol_type = other RNA
gcagccccagtcccgccagtcc

SEQ ID NO: 12022 - RNA, 22 nt, synthetic construct
  source 1..22: mol_type = other RNA
gcagccgcttagcgactctcgc

SEQ ID NO: 12023 - RNA, 22 nt, synthetic construct
  source 1..22: mol_type = other RNA
gcagcgcctgggacaaggtaag

SEQ ID NO: 12024 - RNA, 22 nt, synthetic construct
  source 1..22: mol_type = other RNA
gcagcgggctgagtgagctgcc

SEQ ID NO: 12025 - RNA, 22 nt, synthetic construct
  source 1..22: mol_type = other RNA
gcagctcactcagcccgctgcc

SEQ ID NO: 12026 - RNA, 22 nt, synthetic construct
  source 1..22: mol_type = other RNA
gcaggactcgagttaggcccaa

SEQ ID NO: 12027 - RNA, 22 nt, synthetic construct
  source 1..22: mol_type = other RNA
gcaggcggcgggtaaaccgact

SEQ ID NO: 12028 - RNA, 22 nt, synthetic construct
  source 1..22: mol_type = other RNA
gcagggccagggaaagaggggg

SEQ ID NO: 12029 - RNA, 22 nt, synthetic construct
  source 1..22: mol_type = other RNA
gcagggcgggcctccctcccgc

SEQ ID NO: 12030 - RNA, 22 nt, synthetic construct
  source 1..22: mol_type = other RNA
gcaggtcgggcttgtctcgccc

SEQ ID NO: 12031 - RNA, 22 nt, synthetic construct
  source 1..22: mol_type = other RNA
gcagtggtttcgctcatgtgag

SEQ ID NO: 12032 - RNA, 22 nt, synthetic construct
  source 1..22: mol_type = other RNA
gcagtgtctggccccgcgcccc

SEQ ID NO: 12033 - RNA, 22 nt, synthetic construct
  source 1..22: mol_type = other RNA
gcagttcccaggaaagggggtg

SEQ ID NO: 12034 - RNA, 22 nt, synthetic construct
  source 1..22: mol_type = other RNA
gcatagaaggggctttcccaac

SEQ ID NO: 12035 - RNA, 22 nt, synthetic construct
  source 1..22: mol_type = other RNA
gcatccagccacccctttccct

SEQ ID NO: 12036 - RNA, 22 nt, synthetic construct
  source 1..22: mol_type = other RNA
gcatccatatccaagagaaaga

SEQ ID NO: 12037 - RNA, 22 nt, synthetic construct
  source 1..22: mol_type = other RNA
gcatcctcctaagagcttgggg

SEQ ID NO: 12038 - RNA, 22 nt, synthetic construct
  source 1..22: mol_type = other RNA
gcatctctacaccccacctacc

SEQ ID NO: 12039 - RNA, 22 nt, synthetic construct
  source 1..22: mol_type = other RNA
gcatgagagggaaagttaaact

SEQ ID NO: 12040 - RNA, 22 nt, synthetic construct
  source 1..22: mol_type = other RNA
gcattaccttcgccacccccac

SEQ ID NO: 12041 - RNA, 22 nt, synthetic construct
  source 1..22: mol_type = other RNA
gcattttccgctcccttctccc

SEQ ID NO: 12042 - RNA, 22 nt, synthetic construct
  source 1..22: mol_type = other RNA
gccaacacagtagtgccggccc

SEQ ID NO: 12043 - RNA, 22 nt, synthetic construct
  source 1..22: mol_type = other RNA
gccaatcagcggaagccgccgg

SEQ ID NO: 12044 - RNA, 22 nt, synthetic construct
  source 1..22: mol_type = other RNA
gccaatcaggtgtcgaagacaa

SEQ ID NO: 12045 - RNA, 22 nt, synthetic construct
  source 1..22: mol_type = other RNA
gccaatcggcgacaagaggcta

SEQ ID NO: 12046 - RNA, 22 nt, synthetic construct
  source 1..22: mol_type = other RNA
gccaatggcgcggcgggagggg

SEQ ID NO: 12047 - RNA, 22 nt, synthetic construct
  source 1..22: mol_type = other RNA
gccaatgggtgcggggcggtgg

SEQ ID NO: 12048 - RNA, 22 nt, synthetic construct
  source 1..22: mol_type = other RNA
gccacagcgtgtctgagatagc

SEQ ID NO: 12049 - RNA, 22 nt, synthetic construct
  source 1..22: mol_type = other RNA
gccaccagacggcccccctagc

SEQ ID NO: 12050 - RNA, 22 nt, synthetic construct
  source 1..22: mol_type = other RNA
gccacccatccccccagtgtac

SEQ ID NO: 12051 - RNA, 22 nt, synthetic construct
  source 1..22: mol_type = other RNA
gccacccccaccacacgttctc

SEQ ID NO: 12052 - RNA, 22 nt, synthetic construct
  source 1..22: mol_type = other RNA
gccacccccgcgccccgcgcag

SEQ ID NO: 12053 - RNA, 22 nt, synthetic construct
  source 1..22: mol_type = other RNA
gccacccctttccctcccaacg

SEQ ID NO: 12054 - RNA, 22 nt, synthetic construct
  source 1..22: mol_type = other RNA
gccacggcgtttcctggccggg

SEQ ID NO: 12055 - RNA, 22 nt, synthetic construct
  source 1..22: mol_type = other RNA
gccacggggagccagagaacgt

SEQ ID NO: 12056 - RNA, 22 nt, synthetic construct
  source 1..22: mol_type = other RNA
gccacgttgcgcaggggcgcgg

SEQ ID NO: 12057 - RNA, 22 nt, synthetic construct
  source 1..22: mol_type = other RNA
gccactgaccgcacggggattc

SEQ ID NO: 12058 - RNA, 22 nt, synthetic construct
  source 1..22: mol_type = other RNA
gccacttctcacccccctcgcc

SEQ ID NO: 12059 - RNA, 22 nt, synthetic construct
  source 1..22: mol_type = other RNA
gccagaaaacgagagggaaggc

SEQ ID NO: 12060 - RNA, 22 nt, synthetic construct
  source 1..22: mol_type = other RNA
gccagacactgcggcgctcggc

SEQ ID NO: 12061 - RNA, 22 nt, synthetic construct
  source 1..22: mol_type = other RNA
gccagagaacgtgtggtggggg

SEQ ID NO: 12062 - RNA, 22 nt, synthetic construct
  source 1..22: mol_type = other RNA
gccagagccgatttcactgacc

SEQ ID NO: 12063 - RNA, 22 nt, synthetic construct
  source 1..22: mol_type = other RNA
gccagattgtgtcgttttactt

SEQ ID NO: 12064 - RNA, 22 nt, synthetic construct
  source 1..22: mol_type = other RNA
gccaggaaacgccgtggcgccg

SEQ ID NO: 12065 - RNA, 22 nt, synthetic construct
  source 1..22: mol_type = other RNA
gccaggcccacgacccaaggag

SEQ ID NO: 12066 - RNA, 22 nt, synthetic construct
  source 1..22: mol_type = other RNA
gccagggaaagaggggggccgg

SEQ ID NO: 12067 - RNA, 22 nt, synthetic construct
  source 1..22: mol_type = other RNA
gccagtagcaagggcccggtcc

SEQ ID NO: 12068 - RNA, 22 nt, synthetic construct
  source 1..22: mol_type = other RNA
gccagtccgccaacacagtagt

SEQ ID NO: 12069 - RNA, 22 nt, synthetic construct
  source 1..22: mol_type = other RNA
gccatccagaagtctcggccgg

SEQ ID NO: 12070 - RNA, 22 nt, synthetic construct
  source 1..22: mol_type = other RNA
gccatctgaggtgggaagccag

SEQ ID NO: 12071 - RNA, 22 nt, synthetic construct
  source 1..22: mol_type = other RNA
gccattcccggccaggaaacgc

SEQ ID NO: 12072 - RNA, 22 nt, synthetic construct
  source 1..22: mol_type = other RNA
gccattgctctcgcagagggag

SEQ ID NO: 12073 - RNA, 22 nt, synthetic construct
  source 1..22: mol_type = other RNA
gccattggcctctccgcccacc

SEQ ID NO: 12074 - RNA, 22 nt, synthetic construct
  source 1..22: mol_type = other RNA
gccatttgtgttttcacacacg

SEQ ID NO: 12075 - RNA, 22 nt, synthetic construct
  source 1..22: mol_type = other RNA
gcccaacgcggcgccacggcgt

SEQ ID NO: 12076 - RNA, 22 nt, synthetic construct
  source 1..22: mol_type = other RNA
gcccaagaagtgagacaagcaa

SEQ ID NO: 12077 - RNA, 22 nt, synthetic construct
  source 1..22: mol_type = other RNA
gcccaaggcaagtaaaacgaca

SEQ ID NO: 12078 - RNA, 22 nt, synthetic construct
  source 1..22: mol_type = other RNA
gcccaccgccccgcacccattg

SEQ ID NO: 12079 - RNA, 22 nt, synthetic construct
  source 1..22: mol_type = other RNA
gcccacgacccaaggagagcga

SEQ ID NO: 12080 - RNA, 22 nt, synthetic construct
  source 1..22: mol_type = other RNA
gcccactcgccgccaatcagcg

SEQ ID NO: 12081 - RNA, 22 nt, synthetic construct
  source 1..22: mol_type = other RNA
gcccaggccccggcagcgcctg

SEQ ID NO: 12082 - RNA, 22 nt, synthetic construct
  source 1..22: mol_type = other RNA
gccccacccagggggcaacgcg

SEQ ID NO: 12083 - RNA, 22 nt, synthetic construct
  source 1..22: mol_type = other RNA
gccccaggggagggaagggtca

SEQ ID NO: 12084 - RNA, 22 nt, synthetic construct
  source 1..22: mol_type = other RNA
gccccagtcccgccagtccgcc

SEQ ID NO: 12085 - RNA, 22 nt, synthetic construct
  source 1..22: mol_type = other RNA
gcccccagagcgatcagagttg

SEQ ID NO: 12086 - RNA, 22 nt, synthetic construct
  source 1..22: mol_type = other RNA
gccccccacccccacctcacgg

SEQ ID NO: 12087 - RNA, 22 nt, synthetic construct
  source 1..22: mol_type = other RNA
gcccccctagccacccatcccc

SEQ ID NO: 12088 - RNA, 22 nt, synthetic construct
  source 1..22: mol_type = other RNA
gcccccgcctccagcgcgcgct

SEQ ID NO: 12089 - RNA, 22 nt, synthetic construct
  source 1..22: mol_type = other RNA
gccccctcccgccgcgccattg

SEQ ID NO: 12090 - RNA, 22 nt, synthetic construct
  source 1..22: mol_type = other RNA
gccccctgggtggggcgggtag

SEQ ID NO: 12091 - RNA, 22 nt, synthetic construct
  source 1..22: mol_type = other RNA
gccccgcacccattggcccact

SEQ ID NO: 12092 - RNA, 22 nt, synthetic construct
  source 1..22: mol_type = other RNA
gccccgcgcagtggtttcgctc

SEQ ID NO: 12093 - RNA, 22 nt, synthetic construct
  source 1..22: mol_type = other RNA
gccccgcgcccctgcgcaacgt

SEQ ID NO: 12094 - RNA, 22 nt, synthetic construct
  source 1..22: mol_type = other RNA
gccccggcagcgcctgggacaa

SEQ ID NO: 12095 - RNA, 22 nt, synthetic construct
  source 1..22: mol_type = other RNA
gccccggcggcttccgctgatt

SEQ ID NO: 12096 - RNA, 22 nt, synthetic construct
  source 1..22: mol_type = other RNA
gccccgggttcccaccgcctga

SEQ ID NO: 12097 - RNA, 22 nt, synthetic construct
  source 1..22: mol_type = other RNA
gcccctgcgcaacgtggcagga

SEQ ID NO: 12098 - RNA, 22 nt, synthetic construct
  source 1..22: mol_type = other RNA
gcccctggcgccggcgctggga

SEQ ID NO: 12099 - RNA, 22 nt, synthetic construct
  source 1..22: mol_type = other RNA
gccccttctatgctaattgatt

SEQ ID NO: 12100 - RNA, 22 nt, synthetic construct
  source 1..22: mol_type = other RNA
gcccgacctgctacaggcactc

SEQ ID NO: 12101 - RNA, 22 nt, synthetic construct
  source 1..22: mol_type = other RNA
gcccgagcggaaacgccactga

SEQ ID NO: 12102 - RNA, 22 nt, synthetic construct
  source 1..22: mol_type = other RNA
gcccgatcgtgaggttcggtct

SEQ ID NO: 12103 - RNA, 22 nt, synthetic construct
  source 1..22: mol_type = other RNA
gcccgcacacccagcatctcta

SEQ ID NO: 12104 - RNA, 22 nt, synthetic construct
  source 1..22: mol_type = other RNA
gcccgcctgcgctcagagactc

SEQ ID NO: 12105 - RNA, 22 nt, synthetic construct
  source 1..22: mol_type = other RNA
gcccgcgccagagccgatttca

SEQ ID NO: 12106 - RNA, 22 nt, synthetic construct
  source 1..22: mol_type = other RNA
gcccgctgcccgagcggaaacg

SEQ ID NO: 12107 - RNA, 22 nt, synthetic construct
  source 1..22: mol_type = other RNA
gcccggtcccacagcttcgaca

SEQ ID NO: 12108 - RNA, 22 nt, synthetic construct
  source 1..22: mol_type = other RNA
gcccgtacccgtgaggtggggg

SEQ ID NO: 12109 - RNA, 22 nt, synthetic construct
  source 1..22: mol_type = other RNA
gccctccccaagctcttaggag

SEQ ID NO: 12110 - RNA, 22 nt, synthetic construct
  source 1..22: mol_type = other RNA
gccctccgctcgaaatacacag

SEQ ID NO: 12111 - RNA, 22 nt, synthetic construct
  source 1..22: mol_type = other RNA
gccctgcggcaaccggaggggg

SEQ ID NO: 12112 - RNA, 22 nt, synthetic construct
  source 1..22: mol_type = other RNA
gccctggttcaagtaggtaaat

SEQ ID NO: 12113 - RNA, 22 nt, synthetic construct
  source 1..22: mol_type = other RNA
gcccttcaggcggtgggaaccc

SEQ ID NO: 12114 - RNA, 22 nt, synthetic construct
  source 1..22: mol_type = other RNA
gcccttgctactggctcgagtc

SEQ ID NO: 12115 - RNA, 22 nt, synthetic construct
  source 1..22: mol_type = other RNA
gccgaagcacagcctcttctct

SEQ ID NO: 12116 - RNA, 22 nt, synthetic construct
  source 1..22: mol_type = other RNA
gccgagacttctggatggcggc

SEQ ID NO: 12117 - RNA, 22 nt, synthetic construct
  source 1..22: mol_type = other RNA
gccgaggctctctgaggagccg

SEQ ID NO: 12118 - RNA, 22 nt, synthetic construct
  source 1..22: mol_type = other RNA
gccgattggccgtttctcctcc

SEQ ID NO: 12119 - RNA, 22 nt, synthetic construct
  source 1..22: mol_type = other RNA
gccgatttcactgaccctcccc

SEQ ID NO: 12120 - RNA, 22 nt, synthetic construct
  source 1..22: mol_type = other RNA
gccgccaatcagcggaagccgc

SEQ ID NO: 12121 - RNA, 22 nt, synthetic construct
  source 1..22: mol_type = other RNA
gccgccatccagaagtctcggc

SEQ ID NO: 12122 - RNA, 22 nt, synthetic construct
  source 1..22: mol_type = other RNA
gccgcccgcctgcgctcagaga

SEQ ID NO: 12123 - RNA, 22 nt, synthetic construct
  source 1..22: mol_type = other RNA
gccgccgccatccagaagtctc

SEQ ID NO: 12124 - RNA, 22 nt, synthetic construct
  source 1..22: mol_type = other RNA
gccgccgcccgcctgcgctcag

SEQ ID NO: 12125 - RNA, 22 nt, synthetic construct
  source 1..22: mol_type = other RNA
gccgccggggccgcctagagaa

SEQ ID NO: 12126 - RNA, 22 nt, synthetic construct
  source 1..22: mol_type = other RNA
gccgcctagagaagaggctgtg

SEQ ID NO: 12127 - RNA, 22 nt, synthetic construct
  source 1..22: mol_type = other RNA
gccgcctgcttgtcttcgacac

SEQ ID NO: 12128 - RNA, 22 nt, synthetic construct
  source 1..22: mol_type = other RNA
gccgccttgcacacaccgttgc

SEQ ID NO: 12129 - RNA, 22 nt, synthetic construct
  source 1..22: mol_type = other RNA
gccgcgagaacgggggtaggga

SEQ ID NO: 12130 - RNA, 22 nt, synthetic construct
  source 1..22: mol_type = other RNA
gccgcgatctcccctccgtaat

SEQ ID NO: 12131 - RNA, 22 nt, synthetic construct
  source 1..22: mol_type = other RNA
gccgcgccattggcctctccgc

SEQ ID NO: 12132 - RNA, 22 nt, synthetic construct
  source 1..22: mol_type = other RNA
gccgcgcccgcacacccagcat

SEQ ID NO: 12133 - RNA, 22 nt, synthetic construct
  source 1..22: mol_type = other RNA
gccgcggccgccgccatccaga

SEQ ID NO: 12134 - RNA, 22 nt, synthetic construct
  source 1..22: mol_type = other RNA
gccgcgttgggcctaactcgag

SEQ ID NO: 12135 - RNA, 22 nt, synthetic construct
  source 1..22: mol_type = other RNA
gccgcttagcgactctcgcgtt

SEQ ID NO: 12136 - RNA, 22 nt, synthetic construct
  source 1..22: mol_type = other RNA
gccggaagcgctcctccctctg

SEQ ID NO: 12137 - RNA, 22 nt, synthetic construct
  source 1..22: mol_type = other RNA
gccggagcgccgaagcacagcc

SEQ ID NO: 12138 - RNA, 22 nt, synthetic construct
  source 1..22: mol_type = other RNA
gccggcactactgtgttggcgg

SEQ ID NO: 12139 - RNA, 22 nt, synthetic construct
  source 1..22: mol_type = other RNA
gccggcccccctctttccctgg

SEQ ID NO: 12140 - RNA, 22 nt, synthetic construct
  source 1..22: mol_type = other RNA
gccggccgagacttctggatgg

SEQ ID NO: 12141 - RNA, 22 nt, synthetic construct
  source 1..22: mol_type = other RNA
gccggccgcgcccgcacaccca

SEQ ID NO: 12142 - RNA, 22 nt, synthetic construct
  source 1..22: mol_type = other RNA
gccggcgctgggaatccccgtg

SEQ ID NO: 12143 - RNA, 22 nt, synthetic construct
  source 1..22: mol_type = other RNA
gccgggaatggcccgtacccgt

SEQ ID NO: 12144 - RNA, 22 nt, synthetic construct
  source 1..22: mol_type = other RNA
gccggggccgcctagagaagag

SEQ ID NO: 12145 - RNA, 22 nt, synthetic construct
  source 1..22: mol_type = other RNA
gccgtcgggagtacgcagccgc

SEQ ID NO: 12146 - RNA, 22 nt, synthetic construct
  source 1..22: mol_type = other RNA
gccgtctggtggcttgcggggg

SEQ ID NO: 12147 - RNA, 22 nt, synthetic construct
  source 1..22: mol_type = other RNA
gccgtggcgccgcgttgggcct

SEQ ID NO: 12148 - RNA, 22 nt, synthetic construct
  source 1..22: mol_type = other RNA
gccgtgtgtgaaaacacaaatg

SEQ ID NO: 12149 - RNA, 22 nt, synthetic construct
  source 1..22: mol_type = other RNA
gccgtttctcctcccgccgtgt

SEQ ID NO: 12150 - RNA, 22 nt, synthetic construct
  source 1..22: mol_type = other RNA
gcctaactcgagtcctgccgcc

SEQ ID NO: 12151 - RNA, 22 nt, synthetic construct
  source 1..22: mol_type = other RNA
gcctactccacgtttacctttc

SEQ ID NO: 12152 - RNA, 22 nt, synthetic construct
  source 1..22: mol_type = other RNA
gcctagagaagaggctgtgctt

SEQ ID NO: 12153 - RNA, 22 nt, synthetic construct
  source 1..22: mol_type = other RNA
gcctagattagagggggatctc

SEQ ID NO: 12154 - RNA, 22 nt, synthetic construct
  source 1..22: mol_type = other RNA
gcctccagcgcgcgcttcctgc

SEQ ID NO: 12155 - RNA, 22 nt, synthetic construct
  source 1..22: mol_type = other RNA
gcctccctcccgcctgcatcca

SEQ ID NO: 12156 - RNA, 22 nt, synthetic construct
  source 1..22: mol_type = other RNA
gcctcctgcggcgggaggggag

SEQ ID NO: 12157 - RNA, 22 nt, synthetic construct
  source 1..22: mol_type = other RNA
gcctcggctaggtaggggagcg

SEQ ID NO: 12158 - RNA, 22 nt, synthetic construct
  source 1..22: mol_type = other RNA
gcctcggggaggaccgtaccaa

SEQ ID NO: 12159 - RNA, 22 nt, synthetic construct
  source 1..22: mol_type = other RNA
gcctcgttgaatgtgtagggtt

SEQ ID NO: 12160 - RNA, 22 nt, synthetic construct
  source 1..22: mol_type = other RNA
gcctctccgcccaccgccccgc

SEQ ID NO: 12161 - RNA, 22 nt, synthetic construct
  source 1..22: mol_type = other RNA
gcctctcctcaagggaaaggta

SEQ ID NO: 12162 - RNA, 22 nt, synthetic construct
  source 1..22: mol_type = other RNA
gcctcttcaccccctttcctgg

SEQ ID NO: 12163 - RNA, 22 nt, synthetic construct
  source 1..22: mol_type = other RNA
gcctcttctctaggcggccccg

SEQ ID NO: 12164 - RNA, 22 nt, synthetic construct
  source 1..22: mol_type = other RNA
gcctcttgctgccctccgctcg

SEQ ID NO: 12165 - RNA, 22 nt, synthetic construct
  source 1..22: mol_type = other RNA
gcctcttgtcgccgattggccg

SEQ ID NO: 12166 - RNA, 22 nt, synthetic construct
  source 1..22: mol_type = other RNA
gcctgaagggcgagacaagccc

SEQ ID NO: 12167 - RNA, 22 nt, synthetic construct
  source 1..22: mol_type = other RNA
gcctgcatccagccaccccttt

SEQ ID NO: 12168 - RNA, 22 nt, synthetic construct
  source 1..22: mol_type = other RNA
gcctgcgctcagagactcacgc

SEQ ID NO: 12169 - RNA, 22 nt, synthetic construct
  source 1..22: mol_type = other RNA
gcctgcttgtcttcgacacctg

SEQ ID NO: 12170 - RNA, 22 nt, synthetic construct
  source 1..22: mol_type = other RNA
gcctggagttgagccagattgt

SEQ ID NO: 12171 - RNA, 22 nt, synthetic construct
  source 1..22: mol_type = other RNA
gcctggccctccccaagctctt

SEQ ID NO: 12172 - RNA, 22 nt, synthetic construct
  source 1..22: mol_type = other RNA
gcctgggacaaggtaagggtcc

SEQ ID NO: 12173 - RNA, 22 nt, synthetic construct
  source 1..22: mol_type = other RNA
gcctgtagcaggtcgggcttgt

SEQ ID NO: 12174 - RNA, 22 nt, synthetic construct
  source 1..22: mol_type = other RNA
gcctgtgtatttcgagcggagg

SEQ ID NO: 12175 - RNA, 22 nt, synthetic construct
  source 1..22: mol_type = other RNA
gccttccctctcgttttctggc

SEQ ID NO: 12176 - RNA, 22 nt, synthetic construct
  source 1..22: mol_type = other RNA
gccttgcacacaccgttgcaac

SEQ ID NO: 12177 - RNA, 22 nt, synthetic construct
  source 1..22: mol_type = other RNA
gccttgggcgtggagaacgatc

SEQ ID NO: 12178 - RNA, 22 nt, synthetic construct
  source 1..22: mol_type = other RNA
gccttgtgacagacaactctga

SEQ ID NO: 12179 - RNA, 22 nt, synthetic construct
  source 1..22: mol_type = other RNA
gcctttcccgtgggaagtcggg

SEQ ID NO: 12180 - RNA, 22 nt, synthetic construct
  source 1..22: mol_type = other RNA
gcctttctgccccccaccccca

SEQ ID NO: 12181 - RNA, 22 nt, synthetic construct
  source 1..22: mol_type = other RNA
gcctttgaagatattctcacaa

SEQ ID NO: 12182 - RNA, 22 nt, synthetic construct
  source 1..22: mol_type = other RNA
gcctttggctcgctccgccttt

SEQ ID NO: 12183 - RNA, 22 nt, synthetic construct
  source 1..22: mol_type = other RNA
gcctttgggaagcagccatctg

SEQ ID NO: 12184 - RNA, 22 nt, synthetic construct
  source 1..22: mol_type = other RNA
gcgaaaccactgcgcggggcgc

SEQ ID NO: 12185 - RNA, 22 nt, synthetic construct
  source 1..22: mol_type = other RNA
gcgaaggtaatgcctttgggaa

SEQ ID NO: 12186 - RNA, 22 nt, synthetic construct
  source 1..22: mol_type = other RNA
gcgacaagaggctagccggaag

SEQ ID NO: 12187 - RNA, 22 nt, synthetic construct
  source 1..22: mol_type = other RNA
gcgacccaactccccctttcat

SEQ ID NO: 12188 - RNA, 22 nt, synthetic construct
  source 1..22: mol_type = other RNA
gcgactctcgcgttgccccctg

SEQ ID NO: 12189 - RNA, 22 nt, synthetic construct
  source 1..22: mol_type = other RNA
gcgagaacgggggtagggagtg

SEQ ID NO: 12190 - RNA, 22 nt, synthetic construct
  source 1..22: mol_type = other RNA
gcgagacaagcccgacctgcta

SEQ ID NO: 12191 - RNA, 22 nt, synthetic construct
  source 1..22: mol_type = other RNA
gcgagagcaatggctccgtccg

SEQ ID NO: 12192 - RNA, 22 nt, synthetic construct
  source 1..22: mol_type = other RNA
gcgagagtcgctaagcggctgc

SEQ ID NO: 12193 - RNA, 22 nt, synthetic construct
  source 1..22: mol_type = other RNA
gcgagcgcggggagacggagga

SEQ ID NO: 12194 - RNA, 22 nt, synthetic construct
  source 1..22: mol_type = other RNA
gcgaggggggtgagaagtggca

SEQ ID NO: 12195 - RNA, 22 nt, synthetic construct
  source 1..22: mol_type = other RNA
gcgagtgggccaatgggtgcgg

SEQ ID NO: 12196 - RNA, 22 nt, synthetic construct
  source 1..22: mol_type = other RNA
gcgatcagagttgtctgtcaca

SEQ ID NO: 12197 - RNA, 22 nt, synthetic construct
  source 1..22: mol_type = other RNA
gcgatctcccctccgtaatctt

SEQ ID NO: 12198 - RNA, 22 nt, synthetic construct
  source 1..22: mol_type = other RNA
gcgatttacctacttgaaccag

SEQ ID NO: 12199 - RNA, 22 nt, synthetic construct
  source 1..22: mol_type = other RNA
gcgcaacgtggcaggaagcgcg

SEQ ID NO: 12200 - RNA, 22 nt, synthetic construct
  source 1..22: mol_type = other RNA
gcgcacggcactcccgggaggc

SEQ ID NO: 12201 - RNA, 22 nt, synthetic construct
  source 1..22: mol_type = other RNA
gcgcagtggtttcgctcatgtg

SEQ ID NO: 12202 - RNA, 22 nt, synthetic construct
  source 1..22: mol_type = other RNA
gcgccacggcgtttcctggccg

SEQ ID NO: 12203 - RNA, 22 nt, synthetic construct
  source 1..22: mol_type = other RNA
gcgccagagccgatttcactga

SEQ ID NO: 12204 - RNA, 22 nt, synthetic construct
  source 1..22: mol_type = other RNA
gcgccattggcctctccgccca

SEQ ID NO: 12205 - RNA, 22 nt, synthetic construct
  source 1..22: mol_type = other RNA
gcgccccgcgcagtggtttcgc

SEQ ID NO: 12206 - RNA, 22 nt, synthetic construct
  source 1..22: mol_type = other RNA
gcgcccctgcgcaacgtggcag

SEQ ID NO: 12207 - RNA, 22 nt, synthetic construct
  source 1..22: mol_type = other RNA
gcgcccgcacacccagcatctc

SEQ ID NO: 12208 - RNA, 22 nt, synthetic construct
  source 1..22: mol_type = other RNA
gcgccgaagcacagcctcttct

SEQ ID NO: 12209 - RNA, 22 nt, synthetic construct
  source 1..22: mol_type = other RNA
gcgccgcgttgggcctaactcg

SEQ ID NO: 12210 - RNA, 22 nt, synthetic construct
  source 1..22: mol_type = other RNA
gcgccggcgctgggaatccccg

SEQ ID NO: 12211 - RNA, 22 nt, synthetic construct
  source 1..22: mol_type = other RNA
gcgcctgggacaaggtaagggt

SEQ ID NO: 12212 - RNA, 22 nt, synthetic construct
  source 1..22: mol_type = other RNA
gcgcgcgcttcctgccacgttg

SEQ ID NO: 12213 - RNA, 22 nt, synthetic construct
  source 1..22: mol_type = other RNA
gcgcgcttcctgccacgttgcg

SEQ ID NO: 12214 - RNA, 22 nt, synthetic construct
  source 1..22: mol_type = other RNA
gcgcgggcgtcctcccaccctc

SEQ ID NO: 12215 - RNA, 22 nt, synthetic construct
  source 1..22: mol_type = other RNA
gcgcggggagacggaggaggtg

SEQ ID NO: 12216 - RNA, 22 nt, synthetic construct
  source 1..22: mol_type = other RNA
gcgctcagagactcacgcagcc

SEQ ID NO: 12217 - RNA, 22 nt, synthetic construct
  source 1..22: mol_type = other RNA
gcgctccggctcctcagagagc

SEQ ID NO: 12218 - RNA, 22 nt, synthetic construct
  source 1..22: mol_type = other RNA
gcgctcctccctctgcgagagc

SEQ ID NO: 12219 - RNA, 22 nt, synthetic construct
  source 1..22: mol_type = other RNA
gcgctcgctctccttgggtcgt

SEQ ID NO: 12220 - RNA, 22 nt, synthetic construct
  source 1..22: mol_type = other RNA
gcgctcggcctcggggaggacc

SEQ ID NO: 12221 - RNA, 22 nt, synthetic construct
  source 1..22: mol_type = other RNA
gcgctgggaatccccgtgcggt

SEQ ID NO: 12222 - RNA, 22 nt, synthetic construct
  source 1..22: mol_type = other RNA
gcgcttccggctagcctcttgt

SEQ ID NO: 12223 - RNA, 22 nt, synthetic construct
  source 1..22: mol_type = other RNA
gcgcttcctgccacgttgcgca

SEQ ID NO: 12224 - RNA, 22 nt, synthetic construct
  source 1..22: mol_type = other RNA
gcggaaaatgctcgaaaccgga

SEQ ID NO: 12225 - RNA, 22 nt, synthetic construct
  source 1..22: mol_type = other RNA
gcggaaacgccactgaccgcac

SEQ ID NO: 12226 - RNA, 22 nt, synthetic construct
  source 1..22: mol_type = other RNA
gcggaactctggtgggagggga

SEQ ID NO: 12227 - RNA, 22 nt, synthetic construct
  source 1..22: mol_type = other RNA
gcggaagccgccggggccgcct

SEQ ID NO: 12228 - RNA, 22 nt, synthetic construct
  source 1..22: mol_type = other RNA
gcggactggcgggactggggct

SEQ ID NO: 12229 - RNA, 22 nt, synthetic construct
  source 1..22: mol_type = other RNA
gcggagaggccaatggcgcggc

SEQ ID NO: 12230 - RNA, 22 nt, synthetic construct
  source 1..22: mol_type = other RNA
gcggagccgcggccgccgccat

SEQ ID NO: 12231 - RNA, 22 nt, synthetic construct
  source 1..22: mol_type = other RNA
gcggagggcagcaagaggcctc

SEQ ID NO: 12232 - RNA, 22 nt, synthetic construct
  source 1..22: mol_type = other RNA
gcggcaaccggagggggaggga

SEQ ID NO: 12233 - RNA, 22 nt, synthetic construct
  source 1..22: mol_type = other RNA
gcggcagctcactcagcccgct

SEQ ID NO: 12234 - RNA, 22 nt, synthetic construct
  source 1..22: mol_type = other RNA
gcggcaggactcgagttaggcc

SEQ ID NO: 12235 - RNA, 22 nt, synthetic construct
  source 1..22: mol_type = other RNA
gcggcccccagagcgatcagag

SEQ ID NO: 12236 - RNA, 22 nt, synthetic construct
  source 1..22: mol_type = other RNA
gcggccccggcggcttccgctg

SEQ ID NO: 12237 - RNA, 22 nt, synthetic construct
  source 1..22: mol_type = other RNA
gcggccgccgccatccagaagt

SEQ ID NO: 12238 - RNA, 22 nt, synthetic construct
  source 1..22: mol_type = other RNA
gcggccgccgcccgcctgcgct

SEQ ID NO: 12239 - RNA, 22 nt, synthetic construct
  source 1..22: mol_type = other RNA
gcggccttgtgacagacaactc

SEQ ID NO: 12240 - RNA, 22 nt, synthetic construct
  source 1..22: mol_type = other RNA
gcggcgaggggggtgagaagtg

SEQ ID NO: 12241 - RNA, 22 nt, synthetic construct
  source 1..22: mol_type = other RNA
gcggcgagtgggccaatgggtg

SEQ ID NO: 12242 - RNA, 22 nt, synthetic construct
  source 1..22: mol_type = other RNA
gcggcgccacggcgtttcctgg

SEQ ID NO: 12243 - RNA, 22 nt, synthetic construct
  source 1..22: mol_type = other RNA
gcggcgctcggcctcggggagg

SEQ ID NO: 12244 - RNA, 22 nt, synthetic construct
  source 1..22: mol_type = other RNA
gcggcggcagctcactcagccc

SEQ ID NO: 12245 - RNA, 22 nt, synthetic construct
  source 1..22: mol_type = other RNA
gcggcggcggcagctcactcag

SEQ ID NO: 12246 - RNA, 22 nt, synthetic construct
  source 1..22: mol_type = other RNA
gcggcgggaggggagggtcagt

SEQ ID NO: 12247 - RNA, 22 nt, synthetic construct
  source 1..22: mol_type = other RNA
gcggcgggtaaaccgactcccc

SEQ ID NO: 12248 - RNA, 22 nt, synthetic construct
  source 1..22: mol_type = other RNA
gcggctccgccccgggttccca

SEQ ID NO: 12249 - RNA, 22 nt, synthetic construct
  source 1..22: mol_type = other RNA
gcggctgcgtactcccgacggc

SEQ ID NO: 12250 - RNA, 22 nt, synthetic construct
  source 1..22: mol_type = other RNA
gcggcttccgctgattggcggc

SEQ ID NO: 12251 - RNA, 22 nt, synthetic construct
  source 1..22: mol_type = other RNA
gcgggactggggctgcgtgagt

SEQ ID NO: 12252 - RNA, 22 nt, synthetic construct
  source 1..22: mol_type = other RNA
gcgggaggagaaacggccaatc

SEQ ID NO: 12253 - RNA, 22 nt, synthetic construct
  source 1..22: mol_type = other RNA
gcgggaggggagggtcagtgaa

SEQ ID NO: 12254 - RNA, 22 nt, synthetic construct
  source 1..22: mol_type = other RNA
gcgggcctccctcccgcctgca

SEQ ID NO: 12255 - RNA, 22 nt, synthetic construct
  source 1..22: mol_type = other RNA
gcgggcgtcctcccaccctccc

SEQ ID NO: 12256 - RNA, 22 nt, synthetic construct
  source 1..22: mol_type = other RNA
gcgggcgttggtacggtcctcc

SEQ ID NO: 12257 - RNA, 22 nt, synthetic construct
  source 1..22: mol_type = other RNA
gcgggctgccggccgagacttc

SEQ ID NO: 12258 - RNA, 22 nt, synthetic construct
  source 1..22: mol_type = other RNA
gcggggagacggaggaggtgac

SEQ ID NO: 12259 - RNA, 22 nt, synthetic construct
  source 1..22: mol_type = other RNA
gcggggaggcgggcgttggtac

SEQ ID NO: 12260 - RNA, 22 nt, synthetic construct
  source 1..22: mol_type = other RNA
gcggggccagacactgcggcgc

SEQ ID NO: 12261 - RNA, 22 nt, synthetic construct
  source 1..22: mol_type = other RNA
gcggggcggtgggcggagaggc

SEQ ID NO: 12262 - RNA, 22 nt, synthetic construct
  source 1..22: mol_type = other RNA
gcgggggcgggctgccggccga

SEQ ID NO: 12263 - RNA, 22 nt, synthetic construct
  source 1..22: mol_type = other RNA
gcgggggtggcggggaggcggg

SEQ ID NO: 12264 - RNA, 22 nt, synthetic construct
  source 1..22: mol_type = other RNA
gcgggggttgcctttcccgtgg

SEQ ID NO: 12265 - RNA, 22 nt, synthetic construct
  source 1..22: mol_type = other RNA
gcgggtaaaccgactcccccga

SEQ ID NO: 12266 - RNA, 22 nt, synthetic construct
  source 1..22: mol_type = other RNA
gcgggtaggtaggtggggtgta

SEQ ID NO: 12267 - RNA, 22 nt, synthetic construct
  source 1..22: mol_type = other RNA
gcggtacactggggggatgggt

SEQ ID NO: 12268 - RNA, 22 nt, synthetic construct
  source 1..22: mol_type = other RNA
gcggtcagtggcgtttccgctc

SEQ ID NO: 12269 - RNA, 22 nt, synthetic construct
  source 1..22: mol_type = other RNA
gcggtgggcggagaggccaatg

SEQ ID NO: 12270 - RNA, 22 nt, synthetic construct
  source 1..22: mol_type = other RNA
gcgtaactgacaggagctttac

SEQ ID NO: 12271 - RNA, 22 nt, synthetic construct
  source 1..22: mol_type = other RNA
gcgtactcccgacggcgtaact

SEQ ID NO: 12272 - RNA, 22 nt, synthetic construct
  source 1..22: mol_type = other RNA
gcgtattctggttggagtaaag

SEQ ID NO: 12273 - RNA, 22 nt, synthetic construct
  source 1..22: mol_type = other RNA
gcgtcagtggtctttctcttgg

SEQ ID NO: 12274 - RNA, 22 nt, synthetic construct
  source 1..22: mol_type = other RNA
gcgtccaggaagattacggagg

SEQ ID NO: 12275 - RNA, 22 nt, synthetic construct
  source 1..22: mol_type = other RNA
gcgtcctcccaccctccccttc

SEQ ID NO: 12276 - RNA, 22 nt, synthetic construct
  source 1..22: mol_type = other RNA
gcgtcctgacccaggaaaaaca

SEQ ID NO: 12277 - RNA, 22 nt, synthetic construct
  source 1..22: mol_type = other RNA
gcgtgagtctctgagcgcaggc

SEQ ID NO: 12278 - RNA, 22 nt, synthetic construct
  source 1..22: mol_type = other RNA
gcgtggagaacgatcttgtgag

SEQ ID NO: 12279 - RNA, 22 nt, synthetic construct
  source 1..22: mol_type = other RNA
gcgtgtaagtcgggaatgtgaa

SEQ ID NO: 12280 - RNA, 22 nt, synthetic construct
  source 1..22: mol_type = other RNA
gcgtgtctgagatagcctcgtt

SEQ ID NO: 12281 - RNA, 22 nt, synthetic construct
  source 1..22: mol_type = other RNA
gcgtgtgccacagcgtgtctga

SEQ ID NO: 12282 - RNA, 22 nt, synthetic construct
  source 1..22: mol_type = other RNA
gcgttgccccctgggtggggcg

SEQ ID NO: 12283 - RNA, 22 nt, synthetic construct
  source 1..22: mol_type = other RNA
gcgttgggcctaactcgagtcc

SEQ ID NO: 12284 - RNA, 22 nt, synthetic construct
  source 1..22: mol_type = other RNA
gcgttgggggaggggaagcgtc

SEQ ID NO: 12285 - RNA, 22 nt, synthetic construct
  source 1..22: mol_type = other RNA
gcgttggtacggtcctccccga

SEQ ID NO: 12286 - RNA, 22 nt, synthetic construct
  source 1..22: mol_type = other RNA
gcgtttccgctcgggcagcggg

SEQ ID NO: 12287 - RNA, 22 nt, synthetic construct
  source 1..22: mol_type = other RNA
gcgtttcctggccgggaatggc

SEQ ID NO: 12288 - RNA, 22 nt, synthetic construct
  source 1..22: mol_type = other RNA
gctaagcggctgcgtactcccg

SEQ ID NO: 12289 - RNA, 22 nt, synthetic construct
  source 1..22: mol_type = other RNA
gctaattgattctatagagtcc

SEQ ID NO: 12290 - RNA, 22 nt, synthetic construct
  source 1..22: mol_type = other RNA
gctacaggcactcgtgggggtg

SEQ ID NO: 12291 - RNA, 22 nt, synthetic construct
  source 1..22: mol_type = other RNA
gctactggctcgagtctcacat

SEQ ID NO: 12292 - RNA, 22 nt, synthetic construct
  source 1..22: mol_type = other RNA
gctagccggaagcgctcctccc

SEQ ID NO: 12293 - RNA, 22 nt, synthetic construct
  source 1..22: mol_type = other RNA
gctagcctcttgtcgccgattg

SEQ ID NO: 12294 - RNA, 22 nt, synthetic construct
  source 1..22: mol_type = other RNA
gctaggggggccgtctggtggc

SEQ ID NO: 12295 - RNA, 22 nt, synthetic construct
  source 1..22: mol_type = other RNA
gctaggtaggggagcggaactc

SEQ ID NO: 12296 - RNA, 22 nt, synthetic construct
  source 1..22: mol_type = other RNA
gctatctcagacacgctgtggc

SEQ ID NO: 12297 - RNA, 22 nt, synthetic construct
  source 1..22: mol_type = other RNA
gctcaactccaggctcgaaccc

SEQ ID NO: 12298 - RNA, 22 nt, synthetic construct
  source 1..22: mol_type = other RNA
gctcactcagcccgctgcccga

SEQ ID NO: 12299 - RNA, 22 nt, synthetic construct
  source 1..22: mol_type = other RNA
gctcagagactcacgcagcccc

SEQ ID NO: 12300 - RNA, 22 nt, synthetic construct
  source 1..22: mol_type = other RNA
gctcatgtgagactcgagccag

SEQ ID NO: 12301 - RNA, 22 nt, synthetic construct
  source 1..22: mol_type = other RNA
gctccccgtggcgtgtgccaca

SEQ ID NO: 12302 - RNA, 22 nt, synthetic construct
  source 1..22: mol_type = other RNA
gctcccctacctagccgaggct

SEQ ID NO: 12303 - RNA, 22 nt, synthetic construct
  source 1..22: mol_type = other RNA
gctcccttctccctccccctcc

SEQ ID NO: 12304 - RNA, 22 nt, synthetic construct
  source 1..22: mol_type = other RNA
gctccgccccgggttcccaccg

SEQ ID NO: 12305 - RNA, 22 nt, synthetic construct
  source 1..22: mol_type = other RNA
gctccgcctttctgccccccac

SEQ ID NO: 12306 - RNA, 22 nt, synthetic construct
  source 1..22: mol_type = other RNA
gctccggctcctcagagagcct

SEQ ID NO: 12307 - RNA, 22 nt, synthetic construct
  source 1..22: mol_type = other RNA
gctccgtccggtttcgagcatt

SEQ ID NO: 12308 - RNA, 22 nt, synthetic construct
  source 1..22: mol_type = other RNA
gctcctcagagagcctcggcta

SEQ ID NO: 12309 - RNA, 22 nt, synthetic construct
  source 1..22: mol_type = other RNA
gctcctcccccacccccacgag

SEQ ID NO: 12310 - RNA, 22 nt, synthetic construct
  source 1..22: mol_type = other RNA
gctcctccctctgcgagagcaa

SEQ ID NO: 12311 - RNA, 22 nt, synthetic construct
  source 1..22: mol_type = other RNA
gctcctgtcagttacgccgtcg

SEQ ID NO: 12312 - RNA, 22 nt, synthetic construct
  source 1..22: mol_type = other RNA
gctcgaaaccggacggagccat

SEQ ID NO: 12313 - RNA, 22 nt, synthetic construct
  source 1..22: mol_type = other RNA
gctcgaaccctacacattcaac

SEQ ID NO: 12314 - RNA, 22 nt, synthetic construct
  source 1..22: mol_type = other RNA
gctcgagtctcacatgagcgaa

SEQ ID NO: 12315 - RNA, 22 nt, synthetic construct
  source 1..22: mol_type = other RNA
gctcgctccgcctttctgcccc

SEQ ID NO: 12316 - RNA, 22 nt, synthetic construct
  source 1..22: mol_type = other RNA
gctcgctctccttgggtcgtgg

SEQ ID NO: 12317 - RNA, 22 nt, synthetic construct
  source 1..22: mol_type = other RNA
gctcggcctcggggaggaccgt

SEQ ID NO: 12318 - RNA, 22 nt, synthetic construct
  source 1..22: mol_type = other RNA
gctcgggcagcgggctgagtga

SEQ ID NO: 12319 - RNA, 22 nt, synthetic construct
  source 1..22: mol_type = other RNA
gctctccttgggtcgtgggcct

SEQ ID NO: 12320 - RNA, 22 nt, synthetic construct
  source 1..22: mol_type = other RNA
gctctcgcagagggaggagcgc

SEQ ID NO: 12321 - RNA, 22 nt, synthetic construct
  source 1..22: mol_type = other RNA
gctctctgaggagccggagcgc

SEQ ID NO: 12322 - RNA, 22 nt, synthetic construct
  source 1..22: mol_type = other RNA
gctctggcgcgggcgtcctccc

SEQ ID NO: 12323 - RNA, 22 nt, synthetic construct
  source 1..22: mol_type = other RNA
gctctgggggccgcgatctccc

SEQ ID NO: 12324 - RNA, 22 nt, synthetic construct
  source 1..22: mol_type = other RNA
gctcttaggaggatgctgccac

SEQ ID NO: 12325 - RNA, 22 nt, synthetic construct
  source 1..22: mol_type = other RNA
gctctttcctacactcctcttc

SEQ ID NO: 12326 - RNA, 22 nt, synthetic construct
  source 1..22: mol_type = other RNA
gctgattggcggcgagtgggcc

SEQ ID NO: 12327 - RNA, 22 nt, synthetic construct
  source 1..22: mol_type = other RNA
gctgccacttctcacccccctc

SEQ ID NO: 12328 - RNA, 22 nt, synthetic construct
  source 1..22: mol_type = other RNA
gctgcccgagcggaaacgccac

SEQ ID NO: 12329 - RNA, 22 nt, synthetic construct
  source 1..22: mol_type = other RNA
gctgccctccgctcgaaataca

SEQ ID NO: 12330 - RNA, 22 nt, synthetic construct
  source 1..22: mol_type = other RNA
gctgccggccgagacttctgga

SEQ ID NO: 12331 - RNA, 22 nt, synthetic construct
  source 1..22: mol_type = other RNA
gctgcgtactcccgacggcgta

SEQ ID NO: 12332 - RNA, 22 nt, synthetic construct
  source 1..22: mol_type = other RNA
gctgcgtgagtctctgagcgca

SEQ ID NO: 12333 - RNA, 22 nt, synthetic construct
  source 1..22: mol_type = other RNA
gctgcttcccaaaggcattacc

SEQ ID NO: 12334 - RNA, 22 nt, synthetic construct
  source 1..22: mol_type = other RNA
gctggatgcaggcgggagggag

SEQ ID NO: 12335 - RNA, 22 nt, synthetic construct
  source 1..22: mol_type = other RNA
gctgggaatccccgtgcggtca

SEQ ID NO: 12336 - RNA, 22 nt, synthetic construct
  source 1..22: mol_type = other RNA
gctgtcgaagctgtgggaccgg

SEQ ID NO: 12337 - RNA, 22 nt, synthetic construct
  source 1..22: mol_type = other RNA
gctgtgcttcggcgctccggct

SEQ ID NO: 12338 - RNA, 22 nt, synthetic construct
  source 1..22: mol_type = other RNA
gctgtggcacacgccacgggga

SEQ ID NO: 12339 - RNA, 22 nt, synthetic construct
  source 1..22: mol_type = other RNA
gctgtgggaccgggcccttgct

SEQ ID NO: 12340 - RNA, 22 nt, synthetic construct
  source 1..22: mol_type = other RNA
gcttagcgactctcgcgttgcc

SEQ ID NO: 12341 - RNA, 22 nt, synthetic construct
  source 1..22: mol_type = other RNA
gcttcccaaaggcattaccttc

SEQ ID NO: 12342 - RNA, 22 nt, synthetic construct
  source 1..22: mol_type = other RNA
gcttcccacctcagatggctgc

SEQ ID NO: 12343 - RNA, 22 nt, synthetic construct
  source 1..22: mol_type = other RNA
gcttcccctcccccaacgcctc

SEQ ID NO: 12344 - RNA, 22 nt, synthetic construct
  source 1..22: mol_type = other RNA
gcttccgctgattggcggcgag

SEQ ID NO: 12345 - RNA, 22 nt, synthetic construct
  source 1..22: mol_type = other RNA
gcttccggctagcctcttgtcg

SEQ ID NO: 12346 - RNA, 22 nt, synthetic construct
  source 1..22: mol_type = other RNA
gcttcctgccacgttgcgcagg

SEQ ID NO: 12347 - RNA, 22 nt, synthetic construct
  source 1..22: mol_type = other RNA
gcttcgacagccaatcaggtgt

SEQ ID NO: 12348 - RNA, 22 nt, synthetic construct
  source 1..22: mol_type = other RNA
gcttcggcgctccggctcctca

SEQ ID NO: 12349 - RNA, 22 nt, synthetic construct
  source 1..22: mol_type = other RNA
gcttgcgggggttgcctttccc

SEQ ID NO: 12350 - RNA, 22 nt, synthetic construct
  source 1..22: mol_type = other RNA
gcttggggagggccaggcccac

SEQ ID NO: 12351 - RNA, 22 nt, synthetic construct
  source 1..22: mol_type = other RNA
gcttgtctcacttcttgggcgt

SEQ ID NO: 12352 - RNA, 22 nt, synthetic construct
  source 1..22: mol_type = other RNA
gcttgtctcgcccttcaggcgg

SEQ ID NO: 12353 - RNA, 22 nt, synthetic construct
  source 1..22: mol_type = other RNA
gcttgtcttcgacacctgattg

SEQ ID NO: 12354 - RNA, 22 nt, synthetic construct
  source 1..22: mol_type = other RNA
gctttactccaaccagaatacg

SEQ ID NO: 12355 - RNA, 22 nt, synthetic construct
  source 1..22: mol_type = other RNA
gctttcccaacagtttaacttt

SEQ ID NO: 12356 - RNA, 22 nt, synthetic construct
  source 1..22: mol_type = other RNA
ggaaaaacatgaaagggggagt

SEQ ID NO: 12357 - RNA, 22 nt, synthetic construct
  source 1..22: mol_type = other RNA
ggaaaatgctcgaaaccggacg

SEQ ID NO: 12358 - RNA, 22 nt, synthetic construct
  source 1..22: mol_type = other RNA
ggaaaatggggtgttgcaacgg

SEQ ID NO: 12359 - RNA, 22 nt, synthetic construct
  source 1..22: mol_type = other RNA
ggaaacgccactgaccgcacgg

SEQ ID NO: 12360 - RNA, 22 nt, synthetic construct
  source 1..22: mol_type = other RNA
ggaaacgccgtggcgccgcgtt

SEQ ID NO: 12361 - RNA, 22 nt, synthetic construct
  source 1..22: mol_type = other RNA
ggaaagagaattcataaaggga

SEQ ID NO: 12362 - RNA, 22 nt, synthetic construct
  source 1..22: mol_type = other RNA
ggaaagagccctggttcaagta

SEQ ID NO: 12363 - RNA, 22 nt, synthetic construct
  source 1..22: mol_type = other RNA
ggaaagaggggggccggcacta

SEQ ID NO: 12364 - RNA, 22 nt, synthetic construct
  source 1..22: mol_type = other RNA
ggaaagccccttctatgctaat

SEQ ID NO: 12365 - RNA, 22 nt, synthetic construct
  source 1..22: mol_type = other RNA
ggaaaggcaacccccgcaagcc

SEQ ID NO: 12366 - RNA, 22 nt, synthetic construct
  source 1..22: mol_type = other RNA
ggaaagggggtgaagaggcgtt

SEQ ID NO: 12367 - RNA, 22 nt, synthetic construct
  source 1..22: mol_type = other RNA
ggaaaggggtggctggatgcag

SEQ ID NO: 12368 - RNA, 22 nt, synthetic construct
  source 1..22: mol_type = other RNA
ggaaaggtaaacgtggagtagg

SEQ ID NO: 12369 - RNA, 22 nt, synthetic construct
  source 1..22: mol_type = other RNA
ggaaagttaaactgttgggaaa

SEQ ID NO: 12370 - RNA, 22 nt, synthetic construct
  source 1..22: mol_type = other RNA
ggaacataatgtttgttacgtt

SEQ ID NO: 12371 - RNA, 22 nt, synthetic construct
  source 1..22: mol_type = other RNA
ggaactctggtgggaggggagg

SEQ ID NO: 12372 - RNA, 22 nt, synthetic construct
  source 1..22: mol_type = other RNA
ggaactgcctactccacgttta

SEQ ID NO: 12373 - RNA, 22 nt, synthetic construct
  source 1..22: mol_type = other RNA
ggaagattacggaggggagatc

SEQ ID NO: 12374 - RNA, 22 nt, synthetic construct
  source 1..22: mol_type = other RNA
ggaagcagccatctgaggtggg

SEQ ID NO: 12375 - RNA, 22 nt, synthetic construct
  source 1..22: mol_type = other RNA
ggaagccagaaaacgagaggga

SEQ ID NO: 12376 - RNA, 22 nt, synthetic construct
  source 1..22: mol_type = other RNA
ggaagccgccggggccgcctag

SEQ ID NO: 12377 - RNA, 22 nt, synthetic construct
  source 1..22: mol_type = other RNA
ggaagcgctcctccctctgcga

SEQ ID NO: 12378 - RNA, 22 nt, synthetic construct
  source 1..22: mol_type = other RNA
ggaagcgtcctgacccaggaaa

SEQ ID NO: 12379 - RNA, 22 nt, synthetic construct
  source 1..22: mol_type = other RNA
ggaaggcgtccaggaagattac

SEQ ID NO: 12380 - RNA, 22 nt, synthetic construct
  source 1..22: mol_type = other RNA
ggaaggggagggtgggaggacg

SEQ ID NO: 12381 - RNA, 22 nt, synthetic construct
  source 1..22: mol_type = other RNA
ggaagggtcacctcctccgtct

SEQ ID NO: 12382 - RNA, 22 nt, synthetic construct
  source 1..22: mol_type = other RNA
ggaagtcgggaacataatgttt

SEQ ID NO: 12383 - RNA, 22 nt, synthetic construct
  source 1..22: mol_type = other RNA
ggaatatttttctgcctttgaa

SEQ ID NO: 12384 - RNA, 22 nt, synthetic construct
  source 1..22: mol_type = other RNA
ggaatccccgtgcggtcagtgg

SEQ ID NO: 12385 - RNA, 22 nt, synthetic construct
  source 1..22: mol_type = other RNA
ggaatggcccgtacccgtgagg

SEQ ID NO: 12386 - RNA, 22 nt, synthetic construct
  source 1..22: mol_type = other RNA
ggaatgtgaagaggagtgtagg

SEQ ID NO: 12387 - RNA, 22 nt, synthetic construct
  source 1..22: mol_type = other RNA
ggacaaggtaagggtccgacag

SEQ ID NO: 12388 - RNA, 22 nt, synthetic construct
  source 1..22: mol_type = other RNA
ggacacgccccctcccgccgcg

SEQ ID NO: 12389 - RNA, 22 nt, synthetic construct
  source 1..22: mol_type = other RNA
ggacccttaccttgtcccaggc

SEQ ID NO: 12390 - RNA, 22 nt, synthetic construct
  source 1..22: mol_type = other RNA
ggaccgacccccgctcctcccc

SEQ ID NO: 12391 - RNA, 22 nt, synthetic construct
  source 1..22: mol_type = other RNA
ggaccgggcccttgctactggc

SEQ ID NO: 12392 - RNA, 22 nt, synthetic construct
  source 1..22: mol_type = other RNA
ggaccgtaccaacgcccgcctc

SEQ ID NO: 12393 - RNA, 22 nt, synthetic construct
  source 1..22: mol_type = other RNA
ggacgcccgcgccagagccgat

SEQ ID NO: 12394 - RNA, 22 nt, synthetic construct
  source 1..22: mol_type = other RNA
ggacgccttccctctcgttttc

SEQ ID NO: 12395 - RNA, 22 nt, synthetic construct
  source 1..22: mol_type = other RNA
ggacgcttcccctcccccaacg

SEQ ID NO: 12396 - RNA, 22 nt, synthetic construct
  source 1..22: mol_type = other RNA
ggacggagccattgctctcgca

SEQ ID NO: 12397 - RNA, 22 nt, synthetic construct
  source 1..22: mol_type = other RNA
ggactcgagttaggcccaacgc

SEQ ID NO: 12398 - RNA, 22 nt, synthetic construct
  source 1..22: mol_type = other RNA
ggactctatagaatcaattagc

SEQ ID NO: 12399 - RNA, 22 nt, synthetic construct
  source 1..22: mol_type = other RNA
ggactggcgggactggggctgc

SEQ ID NO: 12400 - RNA, 22 nt, synthetic construct
  source 1..22: mol_type = other RNA
ggactggggctgcgtgagtctc

SEQ ID NO: 12401 - RNA, 22 nt, synthetic construct
  source 1..22: mol_type = other RNA
ggagaaacggccaatcggcgac

SEQ ID NO: 12402 - RNA, 22 nt, synthetic construct
  source 1..22: mol_type = other RNA
ggagaacgatcttgtgagaata

SEQ ID NO: 12403 - RNA, 22 nt, synthetic construct
  source 1..22: mol_type = other RNA
ggagaagggagcggaaaatgct

SEQ ID NO: 12404 - RNA, 22 nt, synthetic construct
  source 1..22: mol_type = other RNA
ggagacggaggaggtgaccctt

SEQ ID NO: 12405 - RNA, 22 nt, synthetic construct
  source 1..22: mol_type = other RNA
ggagagagatccccctctaatc

SEQ ID NO: 12406 - RNA, 22 nt, synthetic construct
  source 1..22: mol_type = other RNA
ggagagcgagcgcggggagacg

SEQ ID NO: 12407 - RNA, 22 nt, synthetic construct
  source 1..22: mol_type = other RNA
ggagaggccaatggcgcggcgg

SEQ ID NO: 12408 - RNA, 22 nt, synthetic construct
  source 1..22: mol_type = other RNA
ggagaggcctcttgctgccctc

SEQ ID NO: 12409 - RNA, 22 nt, synthetic construct
  source 1..22: mol_type = other RNA
ggagatcgcggcccccagagcg

SEQ ID NO: 12410 - RNA, 22 nt, synthetic construct
  source 1..22: mol_type = other RNA
ggagccagagaacgtgtggtgg

SEQ ID NO: 12411 - RNA, 22 nt, synthetic construct
  source 1..22: mol_type = other RNA
ggagccattgctctcgcagagg

SEQ ID NO: 12412 - RNA, 22 nt, synthetic construct
  source 1..22: mol_type = other RNA
ggagccgcggccgccgccatcc

SEQ ID NO: 12413 - RNA, 22 nt, synthetic construct
  source 1..22: mol_type = other RNA
ggagccggagcgccgaagcaca

SEQ ID NO: 12414 - RNA, 22 nt, synthetic construct
  source 1..22: mol_type = other RNA
ggagcgccgaagcacagcctct

SEQ ID NO: 12415 - RNA, 22 nt, synthetic construct
  source 1..22: mol_type = other RNA
ggagcgcttccggctagcctct

SEQ ID NO: 12416 - RNA, 22 nt, synthetic construct
  source 1..22: mol_type = other RNA
ggagcggaaaatgctcgaaacc

SEQ ID NO: 12417 - RNA, 22 nt, synthetic construct
  source 1..22: mol_type = other RNA
ggagcggaactctggtgggagg

SEQ ID NO: 12418 - RNA, 22 nt, synthetic construct
  source 1..22: mol_type = other RNA
ggagctttactccaaccagaat

SEQ ID NO: 12419 - RNA, 22 nt, synthetic construct
  source 1..22: mol_type = other RNA
ggaggaccgtaccaacgcccgc

SEQ ID NO: 12420 - RNA, 22 nt, synthetic construct
  source 1..22: mol_type = other RNA
ggaggacgcccgcgccagagcc

SEQ ID NO: 12421 - RNA, 22 nt, synthetic construct
  source 1..22: mol_type = other RNA
ggaggagaaacggccaatcggc

SEQ ID NO: 12422 - RNA, 22 nt, synthetic construct
  source 1..22: mol_type = other RNA
ggaggagcgcttccggctagcc

SEQ ID NO: 12423 - RNA, 22 nt, synthetic construct
  source 1..22: mol_type = other RNA
ggaggaggtgacccttccctcc

SEQ ID NO: 12424 - RNA, 22 nt, synthetic construct
  source 1..22: mol_type = other RNA
ggaggatgctgccacttctcac

SEQ ID NO: 12425 - RNA, 22 nt, synthetic construct
  source 1..22: mol_type = other RNA
ggaggccggccgcgcccgcaca

SEQ ID NO: 12426 - RNA, 22 nt, synthetic construct
  source 1..22: mol_type = other RNA
ggaggcggcaggactcgagtta

SEQ ID NO: 12427 - RNA, 22 nt, synthetic construct
  source 1..22: mol_type = other RNA
ggaggcgggcgttggtacggtc

SEQ ID NO: 12428 - RNA, 22 nt, synthetic construct
  source 1..22: mol_type = other RNA
ggagggaaaggggtggctggat

SEQ ID NO: 12429 - RNA, 22 nt, synthetic construct
  source 1..22: mol_type = other RNA
ggagggaagggtcacctcctcc

SEQ ID NO: 12430 - RNA, 22 nt, synthetic construct
  source 1..22: mol_type = other RNA
ggagggagaagggagcggaaaa

SEQ ID NO: 12431 - RNA, 22 nt, synthetic construct
  source 1..22: mol_type = other RNA
ggagggaggcccgccctgcggc

SEQ ID NO: 12432 - RNA, 22 nt, synthetic construct
  source 1..22: mol_type = other RNA
ggagggcagcaagaggcctctc

SEQ ID NO: 12433 - RNA, 22 nt, synthetic construct
  source 1..22: mol_type = other RNA
ggagggccaggcccacgaccca

SEQ ID NO: 12434 - RNA, 22 nt, synthetic construct
  source 1..22: mol_type = other RNA
ggaggggaagcgtcctgaccca

SEQ ID NO: 12435 - RNA, 22 nt, synthetic construct
  source 1..22: mol_type = other RNA
ggaggggagatcgcggccccca

SEQ ID NO: 12436 - RNA, 22 nt, synthetic construct
  source 1..22: mol_type = other RNA
ggaggggagggtcagtgaaatc

SEQ ID NO: 12437 - RNA, 22 nt, synthetic construct
  source 1..22: mol_type = other RNA
ggaggggaggtgcggtacactg

SEQ ID NO: 12438 - RNA, 22 nt, synthetic construct
  source 1..22: mol_type = other RNA
ggagggggagggagaagggagc

SEQ ID NO: 12439 - RNA, 22 nt, synthetic construct
  source 1..22: mol_type = other RNA
ggagggtcagtgaaatcggctc

SEQ ID NO: 12440 - RNA, 22 nt, synthetic construct
  source 1..22: mol_type = other RNA
ggagggtgggaggacgcccgcg

SEQ ID NO: 12441 - RNA, 22 nt, synthetic construct
  source 1..22: mol_type = other RNA
ggaggtgacccttccctcccct

SEQ ID NO: 12442 - RNA, 22 nt, synthetic construct
  source 1..22: mol_type = other RNA
ggaggtgcggtacactgggggg

SEQ ID NO: 12443 - RNA, 22 nt, synthetic construct
  source 1..22: mol_type = other RNA
ggagtaaagctcctgtcagtta

SEQ ID NO: 12444 - RNA, 22 nt, synthetic construct
  source 1..22: mol_type = other RNA
ggagtacgcagccgcttagcga

SEQ ID NO: 12445 - RNA, 22 nt, synthetic construct
  source 1..22: mol_type = other RNA
ggagtaggcagttcccaggaaa

SEQ ID NO: 12446 - RNA, 22 nt, synthetic construct
  source 1..22: mol_type = other RNA
ggagtcggtttacccgccgcct

SEQ ID NO: 12447 - RNA, 22 nt, synthetic construct
  source 1..22: mol_type = other RNA
ggagtgtaggaaagagccctgg

SEQ ID NO: 12448 - RNA, 22 nt, synthetic construct
  source 1..22: mol_type = other RNA
ggagttgagccagattgtgtcg

SEQ ID NO: 12449 - RNA, 22 nt, synthetic construct
  source 1..22: mol_type = other RNA
ggagttgggtcgcctagattag

SEQ ID NO: 12450 - RNA, 22 nt, synthetic construct
  source 1..22: mol_type = other RNA
ggatctctctccctgggaaaat

SEQ ID NO: 12451 - RNA, 22 nt, synthetic construct
  source 1..22: mol_type = other RNA
ggatgcaggcgggagggaggcc

SEQ ID NO: 12452 - RNA, 22 nt, synthetic construct
  source 1..22: mol_type = other RNA
ggatgctgccacttctcacccc

SEQ ID NO: 12453 - RNA, 22 nt, synthetic construct
  source 1..22: mol_type = other RNA
ggatgggtggctaggggggccg

SEQ ID NO: 12454 - RNA, 22 nt, synthetic construct
  source 1..22: mol_type = other RNA
ggattcccagcgccggcgccag

SEQ ID NO: 12455 - RNA, 22 nt, synthetic construct
  source 1..22: mol_type = other RNA
ggcaacccccgcaagccaccag

SEQ ID NO: 12456 - RNA, 22 nt, synthetic construct
  source 1..22: mol_type = other RNA
ggcaaccggagggggagggaga

SEQ ID NO: 12457 - RNA, 22 nt, synthetic construct
  source 1..22: mol_type = other RNA
ggcaacgcgagagtcgctaagc

SEQ ID NO: 12458 - RNA, 22 nt, synthetic construct
  source 1..22: mol_type = other RNA
ggcaagtaaaacgacacaatct

SEQ ID NO: 12459 - RNA, 22 nt, synthetic construct
  source 1..22: mol_type = other RNA
ggcacacgccacggggagccag

SEQ ID NO: 12460 - RNA, 22 nt, synthetic construct
  source 1..22: mol_type = other RNA
ggcactactgtgttggcggact

SEQ ID NO: 12461 - RNA, 22 nt, synthetic construct
  source 1..22: mol_type = other RNA
ggcactcccgggaggcggcagg

SEQ ID NO: 12462 - RNA, 22 nt, synthetic construct
  source 1..22: mol_type = other RNA
ggcactcgtgggggtgggggag

SEQ ID NO: 12463 - RNA, 22 nt, synthetic construct
  source 1..22: mol_type = other RNA
ggcagaaaaatattccctttat

SEQ ID NO: 12464 - RNA, 22 nt, synthetic construct
  source 1..22: mol_type = other RNA
ggcagaaaggcggagcgagcca

SEQ ID NO: 12465 - RNA, 22 nt, synthetic construct
  source 1..22: mol_type = other RNA
ggcagcaagaggcctctcctca

SEQ ID NO: 12466 - RNA, 22 nt, synthetic construct
  source 1..22: mol_type = other RNA
ggcagcatcctcctaagagctt

SEQ ID NO: 12467 - RNA, 22 nt, synthetic construct
  source 1..22: mol_type = other RNA
ggcagcgcctgggacaaggtaa

SEQ ID NO: 12468 - RNA, 22 nt, synthetic construct
  source 1..22: mol_type = other RNA
ggcagcgggctgagtgagctgc

SEQ ID NO: 12469 - RNA, 22 nt, synthetic construct
  source 1..22: mol_type = other RNA
ggcagctcactcagcccgctgc

SEQ ID NO: 12470 - RNA, 22 nt, synthetic construct
  source 1..22: mol_type = other RNA
ggcaggactcgagttaggccca

SEQ ID NO: 12471 - RNA, 22 nt, synthetic construct
  source 1..22: mol_type = other RNA
ggcagggccagggaaagagggg

SEQ ID NO: 12472 - RNA, 22 nt, synthetic construct
  source 1..22: mol_type = other RNA
ggcagttcccaggaaagggggt

SEQ ID NO: 12473 - RNA, 22 nt, synthetic construct
  source 1..22: mol_type = other RNA
ggcattaccttcgccaccccca

SEQ ID NO: 12474 - RNA, 22 nt, synthetic construct
  source 1..22: mol_type = other RNA
ggccaatcggcgacaagaggct

SEQ ID NO: 12475 - RNA, 22 nt, synthetic construct
  source 1..22: mol_type = other RNA
ggccaatggcgcggcgggaggg

SEQ ID NO: 12476 - RNA, 22 nt, synthetic construct
  source 1..22: mol_type = other RNA
ggccaatgggtgcggggcggtg

SEQ ID NO: 12477 - RNA, 22 nt, synthetic construct
  source 1..22: mol_type = other RNA
ggccagacactgcggcgctcgg

SEQ ID NO: 12478 - RNA, 22 nt, synthetic construct
  source 1..22: mol_type = other RNA
ggccaggaaacgccgtggcgcc

SEQ ID NO: 12479 - RNA, 22 nt, synthetic construct
  source 1..22: mol_type = other RNA
ggccaggcccacgacccaagga

SEQ ID NO: 12480 - RNA, 22 nt, synthetic construct
  source 1..22: mol_type = other RNA
ggccagggaaagaggggggccg

SEQ ID NO: 12481 - RNA, 22 nt, synthetic construct
  source 1..22: mol_type = other RNA
ggccattcccggccaggaaacg

SEQ ID NO: 12482 - RNA, 22 nt, synthetic construct
  source 1..22: mol_type = other RNA
ggcccaacgcggcgccacggcg

SEQ ID NO: 12483 - RNA, 22 nt, synthetic construct
  source 1..22: mol_type = other RNA
ggcccacgacccaaggagagcg

SEQ ID NO: 12484 - RNA, 22 nt, synthetic construct
  source 1..22: mol_type = other RNA
ggcccactcgccgccaatcagc

SEQ ID NO: 12485 - RNA, 22 nt, synthetic construct
  source 1..22: mol_type = other RNA
ggcccaggccccggcagcgcct

SEQ ID NO: 12486 - RNA, 22 nt, synthetic construct
  source 1..22: mol_type = other RNA
ggccccaggggagggaagggtc

SEQ ID NO: 12487 - RNA, 22 nt, synthetic construct
  source 1..22: mol_type = other RNA
ggcccccagagcgatcagagtt

SEQ ID NO: 12488 - RNA, 22 nt, synthetic construct
  source 1..22: mol_type = other RNA
ggcccccctagccacccatccc

SEQ ID NO: 12489 - RNA, 22 nt, synthetic construct
  source 1..22: mol_type = other RNA
ggcccccctctttccctggccc

SEQ ID NO: 12490 - RNA, 22 nt, synthetic construct
  source 1..22: mol_type = other RNA
ggccccgcgcccctgcgcaacg

SEQ ID NO: 12491 - RNA, 22 nt, synthetic construct
  source 1..22: mol_type = other RNA
ggccccggcagcgcctgggaca

SEQ ID NO: 12492 - RNA, 22 nt, synthetic construct
  source 1..22: mol_type = other RNA
ggccccggcggcttccgctgat

SEQ ID NO: 12493 - RNA, 22 nt, synthetic construct
  source 1..22: mol_type = other RNA
ggcccgatcgtgaggttcggtc

SEQ ID NO: 12494 - RNA, 22 nt, synthetic construct
  source 1..22: mol_type = other RNA
ggcccggtcccacagcttcgac

SEQ ID NO: 12495 - RNA, 22 nt, synthetic construct
  source 1..22: mol_type = other RNA
ggcccgtacccgtgaggtgggg

SEQ ID NO: 12496 - RNA, 22 nt, synthetic construct
  source 1..22: mol_type = other RNA
ggccctccccaagctcttagga

SEQ ID NO: 12497 - RNA, 22 nt, synthetic construct
  source 1..22: mol_type = other RNA
ggcccttgctactggctcgagt

SEQ ID NO: 12498 - RNA, 22 nt, synthetic construct
  source 1..22: mol_type = other RNA
ggccgagacttctggatggcgg

SEQ ID NO: 12499 - RNA, 22 nt, synthetic construct
  source 1..22: mol_type = other RNA
ggccgccgccatccagaagtct

SEQ ID NO: 12500 - RNA, 22 nt, synthetic construct
  source 1..22: mol_type = other RNA
ggccgccgcccgcctgcgctca

SEQ ID NO: 12501 - RNA, 22 nt, synthetic construct
  source 1..22: mol_type = other RNA
ggccgcctagagaagaggctgt

SEQ ID NO: 12502 - RNA, 22 nt, synthetic construct
  source 1..22: mol_type = other RNA
ggccgcgagaacgggggtaggg

SEQ ID NO: 12503 - RNA, 22 nt, synthetic construct
  source 1..22: mol_type = other RNA
ggccgcgatctcccctccgtaa

SEQ ID NO: 12504 - RNA, 22 nt, synthetic construct
  source 1..22: mol_type = other RNA
ggccgcgcccgcacacccagca

SEQ ID NO: 12505 - RNA, 22 nt, synthetic construct
  source 1..22: mol_type = other RNA
ggccggcactactgtgttggcg

SEQ ID NO: 12506 - RNA, 22 nt, synthetic construct
  source 1..22: mol_type = other RNA
ggccggccgcgcccgcacaccc

SEQ ID NO: 12507 - RNA, 22 nt, synthetic construct
  source 1..22: mol_type = other RNA
ggccgggaatggcccgtacccg

SEQ ID NO: 12508 - RNA, 22 nt, synthetic construct
  source 1..22: mol_type = other RNA
ggccgtctggtggcttgcgggg

SEQ ID NO: 12509 - RNA, 22 nt, synthetic construct
  source 1..22: mol_type = other RNA
ggccgtttctcctcccgccgtg

SEQ ID NO: 12510 - RNA, 22 nt, synthetic construct
  source 1..22: mol_type = other RNA
ggcctaactcgagtcctgccgc

SEQ ID NO: 12511 - RNA, 22 nt, synthetic construct
  source 1..22: mol_type = other RNA
ggcctccctcccgcctgcatcc

SEQ ID NO: 12512 - RNA, 22 nt, synthetic construct
  source 1..22: mol_type = other RNA
ggcctcctgcggcgggagggga

SEQ ID NO: 12513 - RNA, 22 nt, synthetic construct
  source 1..22: mol_type = other RNA
ggcctcggggaggaccgtacca

SEQ ID NO: 12514 - RNA, 22 nt, synthetic construct
  source 1..22: mol_type = other RNA
ggcctctccgcccaccgccccg

SEQ ID NO: 12515 - RNA, 22 nt, synthetic construct
  source 1..22: mol_type = other RNA
ggcctctcctcaagggaaaggt

SEQ ID NO: 12516 - RNA, 22 nt, synthetic construct
  source 1..22: mol_type = other RNA
ggcctcttgctgccctccgctc

SEQ ID NO: 12517 - RNA, 22 nt, synthetic construct
  source 1..22: mol_type = other RNA
ggcctggccctccccaagctct

SEQ ID NO: 12518 - RNA, 22 nt, synthetic construct
  source 1..22: mol_type = other RNA
ggccttgtgacagacaactctg

SEQ ID NO: 12519 - RNA, 22 nt, synthetic construct
  source 1..22: mol_type = other RNA
ggcgaaggtaatgcctttggga

SEQ ID NO: 12520 - RNA, 22 nt, synthetic construct
  source 1..22: mol_type = other RNA
ggcgacaagaggctagccggaa

SEQ ID NO: 12521 - RNA, 22 nt, synthetic construct
  source 1..22: mol_type = other RNA
ggcgacccaactccccctttca

SEQ ID NO: 12522 - RNA, 22 nt, synthetic construct
  source 1..22: mol_type = other RNA
ggcgagacaagcccgacctgct

SEQ ID NO: 12523 - RNA, 22 nt, synthetic construct
  source 1..22: mol_type = other RNA
ggcgaggggggtgagaagtggc

SEQ ID NO: 12524 - RNA, 22 nt, synthetic construct
  source 1..22: mol_type = other RNA
ggcgagtgggccaatgggtgcg

SEQ ID NO: 12525 - RNA, 22 nt, synthetic construct
  source 1..22: mol_type = other RNA
ggcgcacggcactcccgggagg

SEQ ID NO: 12526 - RNA, 22 nt, synthetic construct
  source 1..22: mol_type = other RNA
ggcgccacggcgtttcctggcc

SEQ ID NO: 12527 - RNA, 22 nt, synthetic construct
  source 1..22: mol_type = other RNA
ggcgccgcgttgggcctaactc

SEQ ID NO: 12528 - RNA, 22 nt, synthetic construct
  source 1..22: mol_type = other RNA
ggcgccggcgctgggaatcccc

SEQ ID NO: 12529 - RNA, 22 nt, synthetic construct
  source 1..22: mol_type = other RNA
ggcgcgggcgtcctcccaccct

SEQ ID NO: 12530 - RNA, 22 nt, synthetic construct
  source 1..22: mol_type = other RNA
ggcgctccggctcctcagagag

SEQ ID NO: 12531 - RNA, 22 nt, synthetic construct
  source 1..22: mol_type = other RNA
ggcgctcggcctcggggaggac

SEQ ID NO: 12532 - RNA, 22 nt, synthetic construct
  source 1..22: mol_type = other RNA
ggcgctgggaatccccgtgcgg

SEQ ID NO: 12533 - RNA, 22 nt, synthetic construct
  source 1..22: mol_type = other RNA
ggcggactggcgggactggggc

SEQ ID NO: 12534 - RNA, 22 nt, synthetic construct
  source 1..22: mol_type = other RNA
ggcggagaggccaatggcgcgg

SEQ ID NO: 12535 - RNA, 22 nt, synthetic construct
  source 1..22: mol_type = other RNA
ggcggagccgcggccgccgcca

SEQ ID NO: 12536 - RNA, 22 nt, synthetic construct
  source 1..22: mol_type = other RNA
ggcggagcgagccaaaggcggg

SEQ ID NO: 12537 - RNA, 22 nt, synthetic construct
  source 1..22: mol_type = other RNA
ggcggcagctcactcagcccgc

SEQ ID NO: 12538 - RNA, 22 nt, synthetic construct
  source 1..22: mol_type = other RNA
ggcggcaggactcgagttaggc

SEQ ID NO: 12539 - RNA, 22 nt, synthetic construct
  source 1..22: mol_type = other RNA
ggcggccccggcggcttccgct

SEQ ID NO: 12540 - RNA, 22 nt, synthetic construct
  source 1..22: mol_type = other RNA
ggcggcgaggggggtgagaagt

SEQ ID NO: 12541 - RNA, 22 nt, synthetic construct
  source 1..22: mol_type = other RNA
ggcggcgagtgggccaatgggt

SEQ ID NO: 12542 - RNA, 22 nt, synthetic construct
  source 1..22: mol_type = other RNA
ggcggcggcagctcactcagcc

SEQ ID NO: 12543 - RNA, 22 nt, synthetic construct
  source 1..22: mol_type = other RNA
ggcggcggcggcagctcactca

SEQ ID NO: 12544 - RNA, 22 nt, synthetic construct
  source 1..22: mol_type = other RNA
ggcggcgggtaaaccgactccc

SEQ ID NO: 12545 - RNA, 22 nt, synthetic construct
  source 1..22: mol_type = other RNA
ggcggcttccgctgattggcgg

SEQ ID NO: 12546 - RNA, 22 nt, synthetic construct
  source 1..22: mol_type = other RNA
ggcgggactggggctgcgtgag

SEQ ID NO: 12547 - RNA, 22 nt, synthetic construct
  source 1..22: mol_type = other RNA
ggcgggaggagaaacggccaat

SEQ ID NO: 12548 - RNA, 22 nt, synthetic construct
  source 1..22: mol_type = other RNA
ggcgggaggggagggtcagtga

SEQ ID NO: 12549 - RNA, 22 nt, synthetic construct
  source 1..22: mol_type = other RNA
ggcgggcctccctcccgcctgc

SEQ ID NO: 12550 - RNA, 22 nt, synthetic construct
  source 1..22: mol_type = other RNA
ggcgggcgttggtacggtcctc

SEQ ID NO: 12551 - RNA, 22 nt, synthetic construct
  source 1..22: mol_type = other RNA
ggcgggctgccggccgagactt

SEQ ID NO: 12552 - RNA, 22 nt, synthetic construct
  source 1..22: mol_type = other RNA
ggcggggaggcgggcgttggta

SEQ ID NO: 12553 - RNA, 22 nt, synthetic construct
  source 1..22: mol_type = other RNA
ggcgggggcgggctgccggccg

SEQ ID NO: 12554 - RNA, 22 nt, synthetic construct
  source 1..22: mol_type = other RNA
ggcgggtaaaccgactcccccg

SEQ ID NO: 12555 - RNA, 22 nt, synthetic construct
  source 1..22: mol_type = other RNA
ggcgggtaggtaggtggggtgt

SEQ ID NO: 12556 - RNA, 22 nt, synthetic construct
  source 1..22: mol_type = other RNA
ggcggtgggcggagaggccaat

SEQ ID NO: 12557 - RNA, 22 nt, synthetic construct
  source 1..22: mol_type = other RNA
ggcgtaactgacaggagcttta

SEQ ID NO: 12558 - RNA, 22 nt, synthetic construct
  source 1..22: mol_type = other RNA
ggcgtattctggttggagtaaa

SEQ ID NO: 12559 - RNA, 22 nt, synthetic construct
  source 1..22: mol_type = other RNA
ggcgtcagtggtctttctcttg

SEQ ID NO: 12560 - RNA, 22 nt, synthetic construct
  source 1..22: mol_type = other RNA
ggcgtccaggaagattacggag

SEQ ID NO: 12561 - RNA, 22 nt, synthetic construct
  source 1..22: mol_type = other RNA
ggcgtcctcccaccctcccctt

SEQ ID NO: 12562 - RNA, 22 nt, synthetic construct
  source 1..22: mol_type = other RNA
ggcgtggagaacgatcttgtga

SEQ ID NO: 12563 - RNA, 22 nt, synthetic construct
  source 1..22: mol_type = other RNA
ggcgtgtgccacagcgtgtctg

SEQ ID NO: 12564 - RNA, 22 nt, synthetic construct
  source 1..22: mol_type = other RNA
ggcgttgggggaggggaagcgt

SEQ ID NO: 12565 - RNA, 22 nt, synthetic construct
  source 1..22: mol_type = other RNA
ggcgttggtacggtcctccccg

SEQ ID NO: 12566 - RNA, 22 nt, synthetic construct
  source 1..22: mol_type = other RNA
ggcgtttccgctcgggcagcgg

SEQ ID NO: 12567 - RNA, 22 nt, synthetic construct
  source 1..22: mol_type = other RNA
ggcgtttcctggccgggaatgg

SEQ ID NO: 12568 - RNA, 22 nt, synthetic construct
  source 1..22: mol_type = other RNA
ggctagccggaagcgctcctcc

SEQ ID NO: 12569 - RNA, 22 nt, synthetic construct
  source 1..22: mol_type = other RNA
ggctagcctcttgtcgccgatt

SEQ ID NO: 12570 - RNA, 22 nt, synthetic construct
  source 1..22: mol_type = other RNA
ggctaggggggccgtctggtgg

SEQ ID NO: 12571 - RNA, 22 nt, synthetic construct
  source 1..22: mol_type = other RNA
ggctaggtaggggagcggaact

SEQ ID NO: 12572 - RNA, 22 nt, synthetic construct
  source 1..22: mol_type = other RNA
ggctatctcagacacgctgtgg

SEQ ID NO: 12573 - RNA, 22 nt, synthetic construct
  source 1..22: mol_type = other RNA
ggctcaactccaggctcgaacc

SEQ ID NO: 12574 - RNA, 22 nt, synthetic construct
  source 1..22: mol_type = other RNA
ggctccccgtggcgtgtgccac

SEQ ID NO: 12575 - RNA, 22 nt, synthetic construct
  source 1..22: mol_type = other RNA
ggctccgccccgggttcccacc

SEQ ID NO: 12576 - RNA, 22 nt, synthetic construct
  source 1..22: mol_type = other RNA
ggctccgtccggtttcgagcat

SEQ ID NO: 12577 - RNA, 22 nt, synthetic construct
  source 1..22: mol_type = other RNA
ggctcctcagagagcctcggct

SEQ ID NO: 12578 - RNA, 22 nt, synthetic construct
  source 1..22: mol_type = other RNA
ggctcgaaccctacacattcaa

SEQ ID NO: 12579 - RNA, 22 nt, synthetic construct
  source 1..22: mol_type = other RNA
ggctcgagtctcacatgagcga

SEQ ID NO: 12580 - RNA, 22 nt, synthetic construct
  source 1..22: mol_type = other RNA
ggctcgctccgcctttctgccc

SEQ ID NO: 12581 - RNA, 22 nt, synthetic construct
  source 1..22: mol_type = other RNA
ggctctctgaggagccggagcg

SEQ ID NO: 12582 - RNA, 22 nt, synthetic construct
  source 1..22: mol_type = other RNA
ggctctggcgcgggcgtcctcc

SEQ ID NO: 12583 - RNA, 22 nt, synthetic construct
  source 1..22: mol_type = other RNA
ggctctttcctacactcctctt

SEQ ID NO: 12584 - RNA, 22 nt, synthetic construct
  source 1..22: mol_type = other RNA
ggctgccggccgagacttctgg

SEQ ID NO: 12585 - RNA, 22 nt, synthetic construct
  source 1..22: mol_type = other RNA
ggctgcgtactcccgacggcgt

SEQ ID NO: 12586 - RNA, 22 nt, synthetic construct
  source 1..22: mol_type = other RNA
ggctgcgtgagtctctgagcgc

SEQ ID NO: 12587 - RNA, 22 nt, synthetic construct
  source 1..22: mol_type = other RNA
ggctgcttcccaaaggcattac

SEQ ID NO: 12588 - RNA, 22 nt, synthetic construct
  source 1..22: mol_type = other RNA
ggctggatgcaggcgggaggga

SEQ ID NO: 12589 - RNA, 22 nt, synthetic construct
  source 1..22: mol_type = other RNA
ggctgtcgaagctgtgggaccg

SEQ ID NO: 12590 - RNA, 22 nt, synthetic construct
  source 1..22: mol_type = other RNA
ggctgtgcttcggcgctccggc

SEQ ID NO: 12591 - RNA, 22 nt, synthetic construct
  source 1..22: mol_type = other RNA
ggcttcccacctcagatggctg

SEQ ID NO: 12592 - RNA, 22 nt, synthetic construct
  source 1..22: mol_type = other RNA
ggcttccgctgattggcggcga

SEQ ID NO: 12593 - RNA, 22 nt, synthetic construct
  source 1..22: mol_type = other RNA
ggcttgcgggggttgcctttcc

SEQ ID NO: 12594 - RNA, 22 nt, synthetic construct
  source 1..22: mol_type = other RNA
ggcttgtctcgcccttcaggcg

SEQ ID NO: 12595 - RNA, 22 nt, synthetic construct
  source 1..22: mol_type = other RNA
ggctttcccaacagtttaactt

SEQ ID NO: 12596 - RNA, 22 nt, synthetic construct
  source 1..22: mol_type = other RNA
gggaaaatggggtgttgcaacg

SEQ ID NO: 12597 - RNA, 22 nt, synthetic construct
  source 1..22: mol_type = other RNA
gggaaagagaattcataaaggg

SEQ ID NO: 12598 - RNA, 22 nt, synthetic construct
  source 1..22: mol_type = other RNA
gggaaagaggggggccggcact

SEQ ID NO: 12599 - RNA, 22 nt, synthetic construct
  source 1..22: mol_type = other RNA
gggaaagccccttctatgctaa

SEQ ID NO: 12600 - RNA, 22 nt, synthetic construct
  source 1..22: mol_type = other RNA
gggaaaggcaacccccgcaagc

SEQ ID NO: 12601 - RNA, 22 nt, synthetic construct
  source 1..22: mol_type = other RNA
gggaaaggggtggctggatgca

SEQ ID NO: 12602 - RNA, 22 nt, synthetic construct
  source 1..22: mol_type = other RNA
gggaaaggtaaacgtggagtag

SEQ ID NO: 12603 - RNA, 22 nt, synthetic construct
  source 1..22: mol_type = other RNA
gggaaagttaaactgttgggaa

SEQ ID NO: 12604 - RNA, 22 nt, synthetic construct
  source 1..22: mol_type = other RNA
gggaacataatgtttgttacgt

SEQ ID NO: 12605 - RNA, 22 nt, synthetic construct
  source 1..22: mol_type = other RNA
gggaactgcctactccacgttt

SEQ ID NO: 12606 - RNA, 22 nt, synthetic construct
  source 1..22: mol_type = other RNA
gggaagcagccatctgaggtgg

SEQ ID NO: 12607 - RNA, 22 nt, synthetic construct
  source 1..22: mol_type = other RNA
gggaagccagaaaacgagaggg

SEQ ID NO: 12608 - RNA, 22 nt, synthetic construct
  source 1..22: mol_type = other RNA
gggaagcgtcctgacccaggaa

SEQ ID NO: 12609 - RNA, 22 nt, synthetic construct
  source 1..22: mol_type = other RNA
gggaaggcgtccaggaagatta

SEQ ID NO: 12610 - RNA, 22 nt, synthetic construct
  source 1..22: mol_type = other RNA
gggaagggtcacctcctccgtc

SEQ ID NO: 12611 - RNA, 22 nt, synthetic construct
  source 1..22: mol_type = other RNA
gggaagtcgggaacataatgtt

SEQ ID NO: 12612 - RNA, 22 nt, synthetic construct
  source 1..22: mol_type = other RNA
gggaatatttttctgcctttga

SEQ ID NO: 12613 - RNA, 22 nt, synthetic construct
  source 1..22: mol_type = other RNA
gggaatccccgtgcggtcagtg

SEQ ID NO: 12614 - RNA, 22 nt, synthetic construct
  source 1..22: mol_type = other RNA
gggaatggcccgtacccgtgag

SEQ ID NO: 12615 - RNA, 22 nt, synthetic construct
  source 1..22: mol_type = other RNA
gggaatgtgaagaggagtgtag

SEQ ID NO: 12616 - RNA, 22 nt, synthetic construct
  source 1..22: mol_type = other RNA
gggacaaggtaagggtccgaca

SEQ ID NO: 12617 - RNA, 22 nt, synthetic construct
  source 1..22: mol_type = other RNA
gggacacgccccctcccgccgc

SEQ ID NO: 12618 - RNA, 22 nt, synthetic construct
  source 1..22: mol_type = other RNA
gggaccgggcccttgctactgg

SEQ ID NO: 12619 - RNA, 22 nt, synthetic construct
  source 1..22: mol_type = other RNA
gggactggggctgcgtgagtct

SEQ ID NO: 12620 - RNA, 22 nt, synthetic construct
  source 1..22: mol_type = other RNA
gggagaagggagcggaaaatgc

SEQ ID NO: 12621 - RNA, 22 nt, synthetic construct
  source 1..22: mol_type = other RNA
gggagacggaggaggtgaccct

SEQ ID NO: 12622 - RNA, 22 nt, synthetic construct
  source 1..22: mol_type = other RNA
gggagagagatccccctctaat

SEQ ID NO: 12623 - RNA, 22 nt, synthetic construct
  source 1..22: mol_type = other RNA
gggagatcgcggcccccagagc

SEQ ID NO: 12624 - RNA, 22 nt, synthetic construct
  source 1..22: mol_type = other RNA
gggagccagagaacgtgtggtg

SEQ ID NO: 12625 - RNA, 22 nt, synthetic construct
  source 1..22: mol_type = other RNA
gggagcggaaaatgctcgaaac

SEQ ID NO: 12626 - RNA, 22 nt, synthetic construct
  source 1..22: mol_type = other RNA
gggagcggaactctggtgggag

SEQ ID NO: 12627 - RNA, 22 nt, synthetic construct
  source 1..22: mol_type = other RNA
gggaggaccgtaccaacgcccg

SEQ ID NO: 12628 - RNA, 22 nt, synthetic construct
  source 1..22: mol_type = other RNA
gggaggacgcccgcgccagagc

SEQ ID NO: 12629 - RNA, 22 nt, synthetic construct
  source 1..22: mol_type = other RNA
gggaggagaaacggccaatcgg

SEQ ID NO: 12630 - RNA, 22 nt, synthetic construct
  source 1..22: mol_type = other RNA
gggaggagcgcttccggctagc

SEQ ID NO: 12631 - RNA, 22 nt, synthetic construct
  source 1..22: mol_type = other RNA
gggaggagcgggggtcggtccg

SEQ ID NO: 12632 - RNA, 22 nt, synthetic construct
  source 1..22: mol_type = other RNA
gggaggcggcaggactcgagtt

SEQ ID NO: 12633 - RNA, 22 nt, synthetic construct
  source 1..22: mol_type = other RNA
gggaggcgggcgttggtacggt

SEQ ID NO: 12634 - RNA, 22 nt, synthetic construct
  source 1..22: mol_type = other RNA
gggagggaaaggggtggctgga

SEQ ID NO: 12635 - RNA, 22 nt, synthetic construct
  source 1..22: mol_type = other RNA
gggagggaagggtcacctcctc

SEQ ID NO: 12636 - RNA, 22 nt, synthetic construct
  source 1..22: mol_type = other RNA
gggagggagaagggagcggaaa

SEQ ID NO: 12637 - RNA, 22 nt, synthetic construct
  source 1..22: mol_type = other RNA
gggagggaggcccgccctgcgg

SEQ ID NO: 12638 - RNA, 22 nt, synthetic construct
  source 1..22: mol_type = other RNA
gggagggccaggcccacgaccc

SEQ ID NO: 12639 - RNA, 22 nt, synthetic construct
  source 1..22: mol_type = other RNA
gggaggggaagcgtcctgaccc

SEQ ID NO: 12640 - RNA, 22 nt, synthetic construct
  source 1..22: mol_type = other RNA
gggaggggagggtcagtgaaat

SEQ ID NO: 12641 - RNA, 22 nt, synthetic construct
  source 1..22: mol_type = other RNA
gggaggggaggtgcggtacact

SEQ ID NO: 12642 - RNA, 22 nt, synthetic construct
  source 1..22: mol_type = other RNA
gggagggtcagtgaaatcggct

SEQ ID NO: 12643 - RNA, 22 nt, synthetic construct
  source 1..22: mol_type = other RNA
gggagggtgggaggacgcccgc

SEQ ID NO: 12644 - RNA, 22 nt, synthetic construct
  source 1..22: mol_type = other RNA
gggaggtgcggtacactggggg

SEQ ID NO: 12645 - RNA, 22 nt, synthetic construct
  source 1..22: mol_type = other RNA
gggagtacgcagccgcttagcg

SEQ ID NO: 12646 - RNA, 22 nt, synthetic construct
  source 1..22: mol_type = other RNA
gggagtcggtttacccgccgcc

SEQ ID NO: 12647 - RNA, 22 nt, synthetic construct
  source 1..22: mol_type = other RNA
gggagttgggtcgcctagatta

SEQ ID NO: 12648 - RNA, 22 nt, synthetic construct
  source 1..22: mol_type = other RNA
gggatctctctccctgggaaaa

SEQ ID NO: 12649 - RNA, 22 nt, synthetic construct
  source 1..22: mol_type = other RNA
gggatgggtggctaggggggcc

SEQ ID NO: 12650 - RNA, 22 nt, synthetic construct
  source 1..22: mol_type = other RNA
gggattcccagcgccggcgcca

SEQ ID NO: 12651 - RNA, 22 nt, synthetic construct
  source 1..22: mol_type = other RNA
gggcaacgcgagagtcgctaag

SEQ ID NO: 12652 - RNA, 22 nt, synthetic construct
  source 1..22: mol_type = other RNA
gggcagaaaggcggagcgagcc

SEQ ID NO: 12653 - RNA, 22 nt, synthetic construct
  source 1..22: mol_type = other RNA
gggcagcaagaggcctctcctc

SEQ ID NO: 12654 - RNA, 22 nt, synthetic construct
  source 1..22: mol_type = other RNA
gggcagcgggctgagtgagctg

SEQ ID NO: 12655 - RNA, 22 nt, synthetic construct
  source 1..22: mol_type = other RNA
gggcagggccagggaaagaggg

SEQ ID NO: 12656 - RNA, 22 nt, synthetic construct
  source 1..22: mol_type = other RNA
gggccaatgggtgcggggcggt

SEQ ID NO: 12657 - RNA, 22 nt, synthetic construct
  source 1..22: mol_type = other RNA
gggccagacactgcggcgctcg

SEQ ID NO: 12658 - RNA, 22 nt, synthetic construct
  source 1..22: mol_type = other RNA
gggccaggcccacgacccaagg

SEQ ID NO: 12659 - RNA, 22 nt, synthetic construct
  source 1..22: mol_type = other RNA
gggccagggaaagaggggggcc

SEQ ID NO: 12660 - RNA, 22 nt, synthetic construct
  source 1..22: mol_type = other RNA
gggccattcccggccaggaaac

SEQ ID NO: 12661 - RNA, 22 nt, synthetic construct
  source 1..22: mol_type = other RNA
gggcccaggccccggcagcgcc

SEQ ID NO: 12662 - RNA, 22 nt, synthetic construct
  source 1..22: mol_type = other RNA
gggccccaggggagggaagggt

SEQ ID NO: 12663 - RNA, 22 nt, synthetic construct
  source 1..22: mol_type = other RNA
gggcccgatcgtgaggttcggt

SEQ ID NO: 12664 - RNA, 22 nt, synthetic construct
  source 1..22: mol_type = other RNA
gggcccggtcccacagcttcga

SEQ ID NO: 12665 - RNA, 22 nt, synthetic construct
  source 1..22: mol_type = other RNA
gggcccttgctactggctcgag

SEQ ID NO: 12666 - RNA, 22 nt, synthetic construct
  source 1..22: mol_type = other RNA
gggccgcctagagaagaggctg

SEQ ID NO: 12667 - RNA, 22 nt, synthetic construct
  source 1..22: mol_type = other RNA
gggccgcgatctcccctccgta

SEQ ID NO: 12668 - RNA, 22 nt, synthetic construct
  source 1..22: mol_type = other RNA
gggccggcactactgtgttggc

SEQ ID NO: 12669 - RNA, 22 nt, synthetic construct
  source 1..22: mol_type = other RNA
gggccgtctggtggcttgcggg

SEQ ID NO: 12670 - RNA, 22 nt, synthetic construct
  source 1..22: mol_type = other RNA
gggcctaactcgagtcctgccg

SEQ ID NO: 12671 - RNA, 22 nt, synthetic construct
  source 1..22: mol_type = other RNA
gggcctccctcccgcctgcatc

SEQ ID NO: 12672 - RNA, 22 nt, synthetic construct
  source 1..22: mol_type = other RNA
gggcctggccctccccaagctc

SEQ ID NO: 12673 - RNA, 22 nt, synthetic construct
  source 1..22: mol_type = other RNA
gggcgagacaagcccgacctgc

SEQ ID NO: 12674 - RNA, 22 nt, synthetic construct
  source 1..22: mol_type = other RNA
gggcggagaggccaatggcgcg

SEQ ID NO: 12675 - RNA, 22 nt, synthetic construct
  source 1..22: mol_type = other RNA
gggcggagccgcggccgccgcc

SEQ ID NO: 12676 - RNA, 22 nt, synthetic construct
  source 1..22: mol_type = other RNA
gggcgggcctccctcccgcctg

SEQ ID NO: 12677 - RNA, 22 nt, synthetic construct
  source 1..22: mol_type = other RNA
gggcgggctgccggccgagact

SEQ ID NO: 12678 - RNA, 22 nt, synthetic construct
  source 1..22: mol_type = other RNA
gggcgggtaggtaggtggggtg

SEQ ID NO: 12679 - RNA, 22 nt, synthetic construct
  source 1..22: mol_type = other RNA
gggcggtgggcggagaggccaa

SEQ ID NO: 12680 - RNA, 22 nt, synthetic construct
  source 1..22: mol_type = other RNA
gggcgtcagtggtctttctctt

SEQ ID NO: 12681 - RNA, 22 nt, synthetic construct
  source 1..22: mol_type = other RNA
gggcgtcctcccaccctcccct

SEQ ID NO: 12682 - RNA, 22 nt, synthetic construct
  source 1..22: mol_type = other RNA
gggcgtggagaacgatcttgtg

SEQ ID NO: 12683 - RNA, 22 nt, synthetic construct
  source 1..22: mol_type = other RNA
gggcgttggtacggtcctcccc

SEQ ID NO: 12684 - RNA, 22 nt, synthetic construct
  source 1..22: mol_type = other RNA
gggctctttcctacactcctct

SEQ ID NO: 12685 - RNA, 22 nt, synthetic construct
  source 1..22: mol_type = other RNA
gggctgccggccgagacttctg

SEQ ID NO: 12686 - RNA, 22 nt, synthetic construct
  source 1..22: mol_type = other RNA
gggctgcgtgagtctctgagcg

SEQ ID NO: 12687 - RNA, 22 nt, synthetic construct
  source 1..22: mol_type = other RNA
gggcttgtctcgcccttcaggc

SEQ ID NO: 12688 - RNA, 22 nt, synthetic construct
  source 1..22: mol_type = other RNA
gggctttcccaacagtttaact

SEQ ID NO: 12689 - RNA, 22 nt, synthetic construct
  source 1..22: mol_type = other RNA
ggggaagcgtcctgacccagga

SEQ ID NO: 12690 - RNA, 22 nt, synthetic construct
  source 1..22: mol_type = other RNA
ggggagacggaggaggtgaccc

SEQ ID NO: 12691 - RNA, 22 nt, synthetic construct
  source 1..22: mol_type = other RNA
ggggagatcgcggcccccagag

SEQ ID NO: 12692 - RNA, 22 nt, synthetic construct
  source 1..22: mol_type = other RNA
ggggagccagagaacgtgtggt

SEQ ID NO: 12693 - RNA, 22 nt, synthetic construct
  source 1..22: mol_type = other RNA
ggggagcggaactctggtggga

SEQ ID NO: 12694 - RNA, 22 nt, synthetic construct
  source 1..22: mol_type = other RNA
ggggaggaccgtaccaacgccc

SEQ ID NO: 12695 - RNA, 22 nt, synthetic construct
  source 1..22: mol_type = other RNA
ggggaggagcgggggtcggtcc

SEQ ID NO: 12696 - RNA, 22 nt, synthetic construct
  source 1..22: mol_type = other RNA
ggggaggcgggcgttggtacgg

SEQ ID NO: 12697 - RNA, 22 nt, synthetic construct
  source 1..22: mol_type = other RNA
ggggagggaagggtcacctcct

SEQ ID NO: 12698 - RNA, 22 nt, synthetic construct
  source 1..22: mol_type = other RNA
ggggagggagaagggagcggaa

SEQ ID NO: 12699 - RNA, 22 nt, synthetic construct
  source 1..22: mol_type = other RNA
ggggagggccaggcccacgacc

SEQ ID NO: 12700 - RNA, 22 nt, synthetic construct
  source 1..22: mol_type = other RNA
ggggaggggaagcgtcctgacc

SEQ ID NO: 12701 - RNA, 22 nt, synthetic construct
  source 1..22: mol_type = other RNA
ggggagggtcagtgaaatcggc

SEQ ID NO: 12702 - RNA, 22 nt, synthetic construct
  source 1..22: mol_type = other RNA
ggggagggtgggaggacgcccg

SEQ ID NO: 12703 - RNA, 22 nt, synthetic construct
  source 1..22: mol_type = other RNA
ggggaggtgcggtacactgggg

SEQ ID NO: 12704 - RNA, 22 nt, synthetic construct
  source 1..22: mol_type = other RNA
ggggagtcggtttacccgccgc

SEQ ID NO: 12705 - RNA, 22 nt, synthetic construct
  source 1..22: mol_type = other RNA
ggggagttgggtcgcctagatt

SEQ ID NO: 12706 - RNA, 22 nt, synthetic construct
  source 1..22: mol_type = other RNA
ggggatctctctccctgggaaa

SEQ ID NO: 12707 - RNA, 22 nt, synthetic construct
  source 1..22: mol_type = other RNA
ggggatgggtggctaggggggc

SEQ ID NO: 12708 - RNA, 22 nt, synthetic construct
  source 1..22: mol_type = other RNA
ggggattcccagcgccggcgcc

SEQ ID NO: 12709 - RNA, 22 nt, synthetic construct
  source 1..22: mol_type = other RNA
ggggcaacgcgagagtcgctaa

SEQ ID NO: 12710 - RNA, 22 nt, synthetic construct
  source 1..22: mol_type = other RNA
ggggcagaaaggcggagcgagc

SEQ ID NO: 12711 - RNA, 22 nt, synthetic construct
  source 1..22: mol_type = other RNA
ggggcagggccagggaaagagg

SEQ ID NO: 12712 - RNA, 22 nt, synthetic construct
  source 1..22: mol_type = other RNA
ggggccagacactgcggcgctc

SEQ ID NO: 12713 - RNA, 22 nt, synthetic construct
  source 1..22: mol_type = other RNA
ggggcccgatcgtgaggttcgg

SEQ ID NO: 12714 - RNA, 22 nt, synthetic construct
  source 1..22: mol_type = other RNA
ggggccgcctagagaagaggct

SEQ ID NO: 12715 - RNA, 22 nt, synthetic construct
  source 1..22: mol_type = other RNA
ggggccgcgatctcccctccgt

SEQ ID NO: 12716 - RNA, 22 nt, synthetic construct
  source 1..22: mol_type = other RNA
ggggccggcactactgtgttgg

SEQ ID NO: 12717 - RNA, 22 nt, synthetic construct
  source 1..22: mol_type = other RNA
ggggccgtctggtggcttgcgg

SEQ ID NO: 12718 - RNA, 22 nt, synthetic construct
  source 1..22: mol_type = other RNA
ggggcgggctgccggccgagac

SEQ ID NO: 12719 - RNA, 22 nt, synthetic construct
  source 1..22: mol_type = other RNA
ggggcgggtaggtaggtggggt

SEQ ID NO: 12720 - RNA, 22 nt, synthetic construct
  source 1..22: mol_type = other RNA
ggggcggtgggcggagaggcca

SEQ ID NO: 12721 - RNA, 22 nt, synthetic construct
  source 1..22: mol_type = other RNA
ggggctgcgtgagtctctgagc

SEQ ID NO: 12722 - RNA, 22 nt, synthetic construct
  source 1..22: mol_type = other RNA
ggggctttcccaacagtttaac

SEQ ID NO: 12723 - RNA, 22 nt, synthetic construct
  source 1..22: mol_type = other RNA
gggggaggagcgggggtcggtc

SEQ ID NO: 12724 - RNA, 22 nt, synthetic construct
  source 1..22: mol_type = other RNA
gggggagggagaagggagcgga

SEQ ID NO: 12725 - RNA, 22 nt, synthetic construct
  source 1..22: mol_type = other RNA
gggggaggggaagcgtcctgac

SEQ ID NO: 12726 - RNA, 22 nt, synthetic construct
  source 1..22: mol_type = other RNA
gggggagtcggtttacccgccg

SEQ ID NO: 12727 - RNA, 22 nt, synthetic construct
  source 1..22: mol_type = other RNA
gggggagttgggtcgcctagat

SEQ ID NO: 12728 - RNA, 22 nt, synthetic construct
  source 1..22: mol_type = other RNA
gggggatctctctccctgggaa

SEQ ID NO: 12729 - RNA, 22 nt, synthetic construct
  source 1..22: mol_type = other RNA
gggggatgggtggctagggggg

SEQ ID NO: 12730 - RNA, 22 nt, synthetic construct
  source 1..22: mol_type = other RNA
gggggcaacgcgagagtcgcta

SEQ ID NO: 12731 - RNA, 22 nt, synthetic construct
  source 1..22: mol_type = other RNA
gggggcagaaaggcggagcgag

SEQ ID NO: 12732 - RNA, 22 nt, synthetic construct
  source 1..22: mol_type = other RNA
gggggcagggccagggaaagag

SEQ ID NO: 12733 - RNA, 22 nt, synthetic construct
  source 1..22: mol_type = other RNA
gggggccgcgatctcccctccg

SEQ ID NO: 12734 - RNA, 22 nt, synthetic construct
  source 1..22: mol_type = other RNA
gggggccggcactactgtgttg

SEQ ID NO: 12735 - RNA, 22 nt, synthetic construct
  source 1..22: mol_type = other RNA
gggggccgtctggtggcttgcg

SEQ ID NO: 12736 - RNA, 22 nt, synthetic construct
  source 1..22: mol_type = other RNA
gggggcgggctgccggccgaga

SEQ ID NO: 12737 - RNA, 22 nt, synthetic construct
  source 1..22: mol_type = other RNA
ggggggatgggtggctaggggg

SEQ ID NO: 12738 - RNA, 22 nt, synthetic construct
  source 1..22: mol_type = other RNA
ggggggcagaaaggcggagcga

SEQ ID NO: 12739 - RNA, 22 nt, synthetic construct
  source 1..22: mol_type = other RNA
ggggggcagggccagggaaaga

SEQ ID NO: 12740 - RNA, 22 nt, synthetic construct
  source 1..22: mol_type = other RNA
ggggggccggcactactgtgtt

SEQ ID NO: 12741 - RNA, 22 nt, synthetic construct
  source 1..22: mol_type = other RNA
ggggggccgtctggtggcttgc

SEQ ID NO: 12742 - RNA, 22 nt, synthetic construct
  source 1..22: mol_type = other RNA
ggggggtgagaagtggcagcat

SEQ ID NO: 12743 - RNA, 22 nt, synthetic construct
  source 1..22: mol_type = other RNA
gggggtagggagtgggggatcg

SEQ ID NO: 12744 - RNA, 22 nt, synthetic construct
  source 1..22: mol_type = other RNA
gggggtgaagaggcgttggggg

SEQ ID NO: 12745 - RNA, 22 nt, synthetic construct
  source 1..22: mol_type = other RNA
gggggtgagaagtggcagcatc

SEQ ID NO: 12746 - RNA, 22 nt, synthetic construct
  source 1..22: mol_type = other RNA
gggggtggcgaaggtaatgcct

SEQ ID NO: 12747 - RNA, 22 nt, synthetic construct
  source 1..22: mol_type = other RNA
gggggtggcggggaggcgggcg

SEQ ID NO: 12748 - RNA, 22 nt, synthetic construct
  source 1..22: mol_type = other RNA
gggggtggggggcagaaaggcg

SEQ ID NO: 12749 - RNA, 22 nt, synthetic construct
  source 1..22: mol_type = other RNA
gggggttgcctttcccgtggga

SEQ ID NO: 12750 - RNA, 22 nt, synthetic construct
  source 1..22: mol_type = other RNA
ggggtagggagtgggggatcgg

SEQ ID NO: 12751 - RNA, 22 nt, synthetic construct
  source 1..22: mol_type = other RNA
ggggtgaagaggcgttggggga

SEQ ID NO: 12752 - RNA, 22 nt, synthetic construct
  source 1..22: mol_type = other RNA
ggggtgagaagtggcagcatcc

SEQ ID NO: 12753 - RNA, 22 nt, synthetic construct
  source 1..22: mol_type = other RNA
ggggtggcgaaggtaatgcctt

SEQ ID NO: 12754 - RNA, 22 nt, synthetic construct
  source 1..22: mol_type = other RNA
ggggtggcggggaggcgggcgt

SEQ ID NO: 12755 - RNA, 22 nt, synthetic construct
  source 1..22: mol_type = other RNA
ggggtggctggatgcaggcggg

SEQ ID NO: 12756 - RNA, 22 nt, synthetic construct
  source 1..22: mol_type = other RNA
ggggtggggggcagaaaggcgg

SEQ ID NO: 12757 - RNA, 22 nt, synthetic construct
  source 1..22: mol_type = other RNA
ggggtgtagagatgctgggtgt

SEQ ID NO: 12758 - RNA, 22 nt, synthetic construct
  source 1..22: mol_type = other RNA
ggggtgttgcaacggtgtgtgc

SEQ ID NO: 12759 - RNA, 22 nt, synthetic construct
  source 1..22: mol_type = other RNA
ggggttgcctttcccgtgggaa

SEQ ID NO: 12760 - RNA, 22 nt, synthetic construct
  source 1..22: mol_type = other RNA
gggtaaaccgactcccccgaag

SEQ ID NO: 12761 - RNA, 22 nt, synthetic construct
  source 1..22: mol_type = other RNA
gggtacgggccattcccggcca

SEQ ID NO: 12762 - RNA, 22 nt, synthetic construct
  source 1..22: mol_type = other RNA
gggtagggagtgggggatcggg

SEQ ID NO: 12763 - RNA, 22 nt, synthetic construct
  source 1..22: mol_type = other RNA
gggtaggtaggtggggtgtaga

SEQ ID NO: 12764 - RNA, 22 nt, synthetic construct
  source 1..22: mol_type = other RNA
gggtcacctcctccgtctcccc

SEQ ID NO: 12765 - RNA, 22 nt, synthetic construct
  source 1..22: mol_type = other RNA
gggtcaggacgcttcccctccc

SEQ ID NO: 12766 - RNA, 22 nt, synthetic construct
  source 1..22: mol_type = other RNA
gggtcagtgaaatcggctctgg

SEQ ID NO: 12767 - RNA, 22 nt, synthetic construct
  source 1..22: mol_type = other RNA
gggtccgacagaaaagagaccg

SEQ ID NO: 12768 - RNA, 22 nt, synthetic construct
  source 1..22: mol_type = other RNA
gggtcgcctagattagaggggg

SEQ ID NO: 12769 - RNA, 22 nt, synthetic construct
  source 1..22: mol_type = other RNA
gggtcgtgggcctggccctccc

SEQ ID NO: 12770 - RNA, 22 nt, synthetic construct
  source 1..22: mol_type = other RNA
gggtgaagaggcgttgggggag

SEQ ID NO: 12771 - RNA, 22 nt, synthetic construct
  source 1..22: mol_type = other RNA
gggtgagaagtggcagcatcct

SEQ ID NO: 12772 - RNA, 22 nt, synthetic construct
  source 1..22: mol_type = other RNA
gggtgcccctggcgccggcgct

SEQ ID NO: 12773 - RNA, 22 nt, synthetic construct
  source 1..22: mol_type = other RNA
gggtgcggggcggtgggcggag

SEQ ID NO: 12774 - RNA, 22 nt, synthetic construct
  source 1..22: mol_type = other RNA
gggtggcgaaggtaatgccttt

SEQ ID NO: 12775 - RNA, 22 nt, synthetic construct
  source 1..22: mol_type = other RNA
gggtggcggggaggcgggcgtt

SEQ ID NO: 12776 - RNA, 22 nt, synthetic construct
  source 1..22: mol_type = other RNA
gggtggctaggggggccgtctg

SEQ ID NO: 12777 - RNA, 22 nt, synthetic construct
  source 1..22: mol_type = other RNA
gggtggctggatgcaggcggga

SEQ ID NO: 12778 - RNA, 22 nt, synthetic construct
  source 1..22: mol_type = other RNA
gggtgggaggacgcccgcgcca

SEQ ID NO: 12779 - RNA, 22 nt, synthetic construct
  source 1..22: mol_type = other RNA
gggtggggcgggtaggtaggtg

SEQ ID NO: 12780 - RNA, 22 nt, synthetic construct
  source 1..22: mol_type = other RNA
gggtggggggcagaaaggcgga

SEQ ID NO: 12781 - RNA, 22 nt, synthetic construct
  source 1..22: mol_type = other RNA
gggtgtagagatgctgggtgtg

SEQ ID NO: 12782 - RNA, 22 nt, synthetic construct
  source 1..22: mol_type = other RNA
gggtgttgcaacggtgtgtgca

SEQ ID NO: 12783 - RNA, 22 nt, synthetic construct
  source 1..22: mol_type = other RNA
gggttcccaccgcctgaagggc

SEQ ID NO: 12784 - RNA, 22 nt, synthetic construct
  source 1..22: mol_type = other RNA
gggttcgagcctggagttgagc

SEQ ID NO: 12785 - RNA, 22 nt, synthetic construct
  source 1..22: mol_type = other RNA
gggttgcctttcccgtgggaag

SEQ ID NO: 12786 - RNA, 22 nt, synthetic construct
  source 1..22: mol_type = other RNA
ggtaaaccgactcccccgaagg

SEQ ID NO: 12787 - RNA, 22 nt, synthetic construct
  source 1..22: mol_type = other RNA
ggtaaacgtggagtaggcagtt

SEQ ID NO: 12788 - RNA, 22 nt, synthetic construct
  source 1..22: mol_type = other RNA
ggtaaatcgcatgagagggaaa

SEQ ID NO: 12789 - RNA, 22 nt, synthetic construct
  source 1..22: mol_type = other RNA
ggtaagggtccgacagaaaaga

SEQ ID NO: 12790 - RNA, 22 nt, synthetic construct
  source 1..22: mol_type = other RNA
ggtaatgcctttgggaagcagc

SEQ ID NO: 12791 - RNA, 22 nt, synthetic construct
  source 1..22: mol_type = other RNA
ggtacactggggggatgggtgg

SEQ ID NO: 12792 - RNA, 22 nt, synthetic construct
  source 1..22: mol_type = other RNA
ggtacgggccattcccggccag

SEQ ID NO: 12793 - RNA, 22 nt, synthetic construct
  source 1..22: mol_type = other RNA
ggtacggtcctccccgaggccg

SEQ ID NO: 12794 - RNA, 22 nt, synthetic construct
  source 1..22: mol_type = other RNA
ggtagggagtgggggatcgggg

SEQ ID NO: 12795 - RNA, 22 nt, synthetic construct
  source 1..22: mol_type = other RNA
ggtaggggagcggaactctggt

SEQ ID NO: 12796 - RNA, 22 nt, synthetic construct
  source 1..22: mol_type = other RNA
ggtaggtaggtggggtgtagag

SEQ ID NO: 12797 - RNA, 22 nt, synthetic construct
  source 1..22: mol_type = other RNA
ggtaggtggggtgtagagatgc

SEQ ID NO: 12798 - RNA, 22 nt, synthetic construct
  source 1..22: mol_type = other RNA
ggtcacctcctccgtctccccg

SEQ ID NO: 12799 - RNA, 22 nt, synthetic construct
  source 1..22: mol_type = other RNA
ggtcaggacgcttcccctcccc

SEQ ID NO: 12800 - RNA, 22 nt, synthetic construct
  source 1..22: mol_type = other RNA
ggtcagtgaaatcggctctggc

SEQ ID NO: 12801 - RNA, 22 nt, synthetic construct
  source 1..22: mol_type = other RNA
ggtcagtggcgtttccgctcgg

SEQ ID NO: 12802 - RNA, 22 nt, synthetic construct
  source 1..22: mol_type = other RNA
ggtcccacagcttcgacagcca

SEQ ID NO: 12803 - RNA, 22 nt, synthetic construct
  source 1..22: mol_type = other RNA
ggtccgacagaaaagagaccga

SEQ ID NO: 12804 - RNA, 22 nt, synthetic construct
  source 1..22: mol_type = other RNA
ggtcctccccgaggccgagcgc

SEQ ID NO: 12805 - RNA, 22 nt, synthetic construct
  source 1..22: mol_type = other RNA
ggtcgcctagattagaggggga

SEQ ID NO: 12806 - RNA, 22 nt, synthetic construct
  source 1..22: mol_type = other RNA
ggtcgggcttgtctcgcccttc

SEQ ID NO: 12807 - RNA, 22 nt, synthetic construct
  source 1..22: mol_type = other RNA
ggtcgtgggcctggccctcccc

SEQ ID NO: 12808 - RNA, 22 nt, synthetic construct
  source 1..22: mol_type = other RNA
ggtctcttttctgtcggaccct

SEQ ID NO: 12809 - RNA, 22 nt, synthetic construct
  source 1..22: mol_type = other RNA
ggtctttctcttggatatggat

SEQ ID NO: 12810 - RNA, 22 nt, synthetic construct
  source 1..22: mol_type = other RNA
ggtgaagaggcgttgggggagg

SEQ ID NO: 12811 - RNA, 22 nt, synthetic construct
  source 1..22: mol_type = other RNA
ggtgacccttccctcccctggg

SEQ ID NO: 12812 - RNA, 22 nt, synthetic construct
  source 1..22: mol_type = other RNA
ggtgagaagtggcagcatcctc

SEQ ID NO: 12813 - RNA, 22 nt, synthetic construct
  source 1..22: mol_type = other RNA
ggtgcccctggcgccggcgctg

SEQ ID NO: 12814 - RNA, 22 nt, synthetic construct
  source 1..22: mol_type = other RNA
ggtgcggggcggtgggcggaga

SEQ ID NO: 12815 - RNA, 22 nt, synthetic construct
  source 1..22: mol_type = other RNA
ggtgcggtacactggggggatg

SEQ ID NO: 12816 - RNA, 22 nt, synthetic construct
  source 1..22: mol_type = other RNA
ggtggcgaaggtaatgcctttg

SEQ ID NO: 12817 - RNA, 22 nt, synthetic construct
  source 1..22: mol_type = other RNA
ggtggcggggaggcgggcgttg

SEQ ID NO: 12818 - RNA, 22 nt, synthetic construct
  source 1..22: mol_type = other RNA
ggtggctaggggggccgtctgg

SEQ ID NO: 12819 - RNA, 22 nt, synthetic construct
  source 1..22: mol_type = other RNA
ggtggctggatgcaggcgggag

SEQ ID NO: 12820 - RNA, 22 nt, synthetic construct
  source 1..22: mol_type = other RNA
ggtggcttgcgggggttgcctt

SEQ ID NO: 12821 - RNA, 22 nt, synthetic construct
  source 1..22: mol_type = other RNA
ggtgggaagccagaaaacgaga

SEQ ID NO: 12822 - RNA, 22 nt, synthetic construct
  source 1..22: mol_type = other RNA
ggtgggaggacgcccgcgccag

SEQ ID NO: 12823 - RNA, 22 nt, synthetic construct
  source 1..22: mol_type = other RNA
ggtgggaggggaggtgcggtac

SEQ ID NO: 12824 - RNA, 22 nt, synthetic construct
  source 1..22: mol_type = other RNA
ggtgggcggagaggccaatggc

SEQ ID NO: 12825 - RNA, 22 nt, synthetic construct
  source 1..22: mol_type = other RNA
ggtggggcgggtaggtaggtgg

SEQ ID NO: 12826 - RNA, 22 nt, synthetic construct
  source 1..22: mol_type = other RNA
ggtgggggaggagcgggggtcg

SEQ ID NO: 12827 - RNA, 22 nt, synthetic construct
  source 1..22: mol_type = other RNA
ggtggggggcagaaaggcggag

SEQ ID NO: 12828 - RNA, 22 nt, synthetic construct
  source 1..22: mol_type = other RNA
ggtgggggtggcgaaggtaatg

SEQ ID NO: 12829 - RNA, 22 nt, synthetic construct
  source 1..22: mol_type = other RNA
ggtgggggtggggggcagaaag

SEQ ID NO: 12830 - RNA, 22 nt, synthetic construct
  source 1..22: mol_type = other RNA
ggtggggtgtagagatgctggg

SEQ ID NO: 12831 - RNA, 22 nt, synthetic construct
  source 1..22: mol_type = other RNA
ggtgtagagatgctgggtgtgc

SEQ ID NO: 12832 - RNA, 22 nt, synthetic construct
  source 1..22: mol_type = other RNA
ggtgtcgaagacaagcaggcgg

SEQ ID NO: 12833 - RNA, 22 nt, synthetic construct
  source 1..22: mol_type = other RNA
ggtgtgtgcaaggcggcgaggg

SEQ ID NO: 12834 - RNA, 22 nt, synthetic construct
  source 1..22: mol_type = other RNA
ggtgttgcaacggtgtgtgcaa

SEQ ID NO: 12835 - RNA, 22 nt, synthetic construct
  source 1..22: mol_type = other RNA
ggttcaagtaggtaaatcgcat

SEQ ID NO: 12836 - RNA, 22 nt, synthetic construct
  source 1..22: mol_type = other RNA
ggttcccaccgcctgaagggcg

SEQ ID NO: 12837 - RNA, 22 nt, synthetic construct
  source 1..22: mol_type = other RNA
ggttcgagcctggagttgagcc

SEQ ID NO: 12838 - RNA, 22 nt, synthetic construct
  source 1..22: mol_type = other RNA
ggttcggtctcttttctgtcgg

SEQ ID NO: 12839 - RNA, 22 nt, synthetic construct
  source 1..22: mol_type = other RNA
ggttgcctttcccgtgggaagt

SEQ ID NO: 12840 - RNA, 22 nt, synthetic construct
  source 1..22: mol_type = other RNA
ggttggagtaaagctcctgtca

SEQ ID NO: 12841 - RNA, 22 nt, synthetic construct
  source 1..22: mol_type = other RNA
ggtttacccgccgcctgcttgt

SEQ ID NO: 12842 - RNA, 22 nt, synthetic construct
  source 1..22: mol_type = other RNA
ggtttcgagcattttccgctcc

SEQ ID NO: 12843 - RNA, 22 nt, synthetic construct
  source 1..22: mol_type = other RNA
ggtttcgctcatgtgagactcg

SEQ ID NO: 12844 - RNA, 22 nt, synthetic construct
  source 1..22: mol_type = other RNA
gtaaaacgacacaatctggctc

SEQ ID NO: 12845 - RNA, 22 nt, synthetic construct
  source 1..22: mol_type = other RNA
gtaaaccgactcccccgaagga

SEQ ID NO: 12846 - RNA, 22 nt, synthetic construct
  source 1..22: mol_type = other RNA
gtaaacgtggagtaggcagttc

SEQ ID NO: 12847 - RNA, 22 nt, synthetic construct
  source 1..22: mol_type = other RNA
gtaaagctcctgtcagttacgc

SEQ ID NO: 12848 - RNA, 22 nt, synthetic construct
  source 1..22: mol_type = other RNA
gtaaatcgcatgagagggaaag

SEQ ID NO: 12849 - RNA, 22 nt, synthetic construct
  source 1..22: mol_type = other RNA
gtaacaaacattatgttcccga

SEQ ID NO: 12850 - RNA, 22 nt, synthetic construct
  source 1..22: mol_type = other RNA
gtaactgacaggagctttactc

SEQ ID NO: 12851 - RNA, 22 nt, synthetic construct
  source 1..22: mol_type = other RNA
gtaagggtccgacagaaaagag

SEQ ID NO: 12852 - RNA, 22 nt, synthetic construct
  source 1..22: mol_type = other RNA
gtaagtcgggaatgtgaagagg

SEQ ID NO: 12853 - RNA, 22 nt, synthetic construct
  source 1..22: mol_type = other RNA
gtaatcttcctggacgccttcc

SEQ ID NO: 12854 - RNA, 22 nt, synthetic construct
  source 1..22: mol_type = other RNA
gtaatgcctttgggaagcagcc

SEQ ID NO: 12855 - RNA, 22 nt, synthetic construct
  source 1..22: mol_type = other RNA
gtacactggggggatgggtggc

SEQ ID NO: 12856 - RNA, 22 nt, synthetic construct
  source 1..22: mol_type = other RNA
gtaccaacgcccgcctccccgc

SEQ ID NO: 12857 - RNA, 22 nt, synthetic construct
  source 1..22: mol_type = other RNA
gtacccgtgaggtgggggtggg

SEQ ID NO: 12858 - RNA, 22 nt, synthetic construct
  source 1..22: mol_type = other RNA
gtaccgcacctcccctcccacc

SEQ ID NO: 12859 - RNA, 22 nt, synthetic construct
  source 1..22: mol_type = other RNA
gtacgcagccgcttagcgactc

SEQ ID NO: 12860 - RNA, 22 nt, synthetic construct
  source 1..22: mol_type = other RNA
gtacgggccattcccggccagg

SEQ ID NO: 12861 - RNA, 22 nt, synthetic construct
  source 1..22: mol_type = other RNA
gtacggtcctccccgaggccga

SEQ ID NO: 12862 - RNA, 22 nt, synthetic construct
  source 1..22: mol_type = other RNA
gtactcccgacggcgtaactga

SEQ ID NO: 12863 - RNA, 22 nt, synthetic construct
  source 1..22: mol_type = other RNA
gtagagatgctgggtgtgcggg

SEQ ID NO: 12864 - RNA, 22 nt, synthetic construct
  source 1..22: mol_type = other RNA
gtagcaagggcccggtcccaca

SEQ ID NO: 12865 - RNA, 22 nt, synthetic construct
  source 1..22: mol_type = other RNA
gtagcaggtcgggcttgtctcg

SEQ ID NO: 12866 - RNA, 22 nt, synthetic construct
  source 1..22: mol_type = other RNA
gtaggaaagagccctggttcaa

SEQ ID NO: 12867 - RNA, 22 nt, synthetic construct
  source 1..22: mol_type = other RNA
gtaggcagttcccaggaaaggg

SEQ ID NO: 12868 - RNA, 22 nt, synthetic construct
  source 1..22: mol_type = other RNA
gtagggagtgggggatcgggga

SEQ ID NO: 12869 - RNA, 22 nt, synthetic construct
  source 1..22: mol_type = other RNA
gtaggggagcggaactctggtg

SEQ ID NO: 12870 - RNA, 22 nt, synthetic construct
  source 1..22: mol_type = other RNA
gtagggttcgagcctggagttg

SEQ ID NO: 12871 - RNA, 22 nt, synthetic construct
  source 1..22: mol_type = other RNA
gtaggtaaatcgcatgagaggg

SEQ ID NO: 12872 - RNA, 22 nt, synthetic construct
  source 1..22: mol_type = other RNA
gtaggtaggtggggtgtagaga

SEQ ID NO: 12873 - RNA, 22 nt, synthetic construct
  source 1..22: mol_type = other RNA
gtaggtggggtgtagagatgct

SEQ ID NO: 12874 - RNA, 22 nt, synthetic construct
  source 1..22: mol_type = other RNA
gtagtgccggcccccctctttc

SEQ ID NO: 12875 - RNA, 22 nt, synthetic construct
  source 1..22: mol_type = other RNA
gtatgcctgtgtatttcgagcg

SEQ ID NO: 12876 - RNA, 22 nt, synthetic construct
  source 1..22: mol_type = other RNA
gtattctggttggagtaaagct

SEQ ID NO: 12877 - RNA, 22 nt, synthetic construct
  source 1..22: mol_type = other RNA
gtatttcgagcggagggcagca

SEQ ID NO: 12878 - RNA, 22 nt, synthetic construct
  source 1..22: mol_type = other RNA
gtcacaaggccgcgagaacggg

SEQ ID NO: 12879 - RNA, 22 nt, synthetic construct
  source 1..22: mol_type = other RNA
gtcacctcctccgtctccccgc

SEQ ID NO: 12880 - RNA, 22 nt, synthetic construct
  source 1..22: mol_type = other RNA
gtcaggacgcttcccctccccc

SEQ ID NO: 12881 - RNA, 22 nt, synthetic construct
  source 1..22: mol_type = other RNA
gtcagtgaaatcggctctggcg

SEQ ID NO: 12882 - RNA, 22 nt, synthetic construct
  source 1..22: mol_type = other RNA
gtcagtggcgtttccgctcggg

SEQ ID NO: 12883 - RNA, 22 nt, synthetic construct
  source 1..22: mol_type = other RNA
gtcagtggtctttctcttggat

SEQ ID NO: 12884 - RNA, 22 nt, synthetic construct
  source 1..22: mol_type = other RNA
gtcagttacgccgtcgggagta

SEQ ID NO: 12885 - RNA, 22 nt, synthetic construct
  source 1..22: mol_type = other RNA
gtccaggaagattacggagggg

SEQ ID NO: 12886 - RNA, 22 nt, synthetic construct
  source 1..22: mol_type = other RNA
gtcccacagcttcgacagccaa

SEQ ID NO: 12887 - RNA, 22 nt, synthetic construct
  source 1..22: mol_type = other RNA
gtcccgccagtccgccaacaca

SEQ ID NO: 12888 - RNA, 22 nt, synthetic construct
  source 1..22: mol_type = other RNA
gtccgacagaaaagagaccgaa

SEQ ID NO: 12889 - RNA, 22 nt, synthetic construct
  source 1..22: mol_type = other RNA
gtccgccaacacagtagtgccg

SEQ ID NO: 12890 - RNA, 22 nt, synthetic construct
  source 1..22: mol_type = other RNA
gtccggtttcgagcattttccg

SEQ ID NO: 12891 - RNA, 22 nt, synthetic construct
  source 1..22: mol_type = other RNA
gtcctcccaccctccccttcct

SEQ ID NO: 12892 - RNA, 22 nt, synthetic construct
  source 1..22: mol_type = other RNA
gtcctccccgaggccgagcgcc

SEQ ID NO: 12893 - RNA, 22 nt, synthetic construct
  source 1..22: mol_type = other RNA
gtcctgacccaggaaaaacatg

SEQ ID NO: 12894 - RNA, 22 nt, synthetic construct
  source 1..22: mol_type = other RNA
gtcctgccgcctcccgggagtg

SEQ ID NO: 12895 - RNA, 22 nt, synthetic construct
  source 1..22: mol_type = other RNA
gtccttgcttgtctcacttctt

SEQ ID NO: 12896 - RNA, 22 nt, synthetic construct
  source 1..22: mol_type = other RNA
gtcgaagacaagcaggcggcgg

SEQ ID NO: 12897 - RNA, 22 nt, synthetic construct
  source 1..22: mol_type = other RNA
gtcgaagctgtgggaccgggcc

SEQ ID NO: 12898 - RNA, 22 nt, synthetic construct
  source 1..22: mol_type = other RNA
gtcgccgattggccgtttctcc

SEQ ID NO: 12899 - RNA, 22 nt, synthetic construct
  source 1..22: mol_type = other RNA
gtcgcctagattagagggggat

SEQ ID NO: 12900 - RNA, 22 nt, synthetic construct
  source 1..22: mol_type = other RNA
gtcgctaagcggctgcgtactc

SEQ ID NO: 12901 - RNA, 22 nt, synthetic construct
  source 1..22: mol_type = other RNA
gtcggacccttaccttgtccca

SEQ ID NO: 12902 - RNA, 22 nt, synthetic construct
  source 1..22: mol_type = other RNA
gtcgggaacataatgtttgtta

SEQ ID NO: 12903 - RNA, 22 nt, synthetic construct
  source 1..22: mol_type = other RNA
gtcgggaatgtgaagaggagtg

SEQ ID NO: 12904 - RNA, 22 nt, synthetic construct
  source 1..22: mol_type = other RNA
gtcgggagtacgcagccgctta

SEQ ID NO: 12905 - RNA, 22 nt, synthetic construct
  source 1..22: mol_type = other RNA
gtcgggcttgtctcgcccttca

SEQ ID NO: 12906 - RNA, 22 nt, synthetic construct
  source 1..22: mol_type = other RNA
gtcggtttacccgccgcctgct

SEQ ID NO: 12907 - RNA, 22 nt, synthetic construct
  source 1..22: mol_type = other RNA
gtcgtgggcctggccctcccca

SEQ ID NO: 12908 - RNA, 22 nt, synthetic construct
  source 1..22: mol_type = other RNA
gtcgttttacttgccttgggcg

SEQ ID NO: 12909 - RNA, 22 nt, synthetic construct
  source 1..22: mol_type = other RNA
gtctcacatgagcgaaaccact

SEQ ID NO: 12910 - RNA, 22 nt, synthetic construct
  source 1..22: mol_type = other RNA
gtctcacttcttgggcgtcagt

SEQ ID NO: 12911 - RNA, 22 nt, synthetic construct
  source 1..22: mol_type = other RNA
gtctccccgcgctcgctctcct

SEQ ID NO: 12912 - RNA, 22 nt, synthetic construct
  source 1..22: mol_type = other RNA
gtctcgcccttcaggcggtggg

SEQ ID NO: 12913 - RNA, 22 nt, synthetic construct
  source 1..22: mol_type = other RNA
gtctcttttctgtcggaccctt

SEQ ID NO: 12914 - RNA, 22 nt, synthetic construct
  source 1..22: mol_type = other RNA
gtctgagatagcctcgttgaat

SEQ ID NO: 12915 - RNA, 22 nt, synthetic construct
  source 1..22: mol_type = other RNA
gtctggccccgcgcccctgcgc

SEQ ID NO: 12916 - RNA, 22 nt, synthetic construct
  source 1..22: mol_type = other RNA
gtctggtggcttgcgggggttg

SEQ ID NO: 12917 - RNA, 22 nt, synthetic construct
  source 1..22: mol_type = other RNA
gtctgtcacaaggccgcgagaa

SEQ ID NO: 12918 - RNA, 22 nt, synthetic construct
  source 1..22: mol_type = other RNA
gtcttcgacacctgattggctg

SEQ ID NO: 12919 - RNA, 22 nt, synthetic construct
  source 1..22: mol_type = other RNA
gtctttctcttggatatggatg

SEQ ID NO: 12920 - RNA, 22 nt, synthetic construct
  source 1..22: mol_type = other RNA
gtgaaaacacaaatggcgtatt

SEQ ID NO: 12921 - RNA, 22 nt, synthetic construct
  source 1..22: mol_type = other RNA
gtgaaatcggctctggcgcggg

SEQ ID NO: 12922 - RNA, 22 nt, synthetic construct
  source 1..22: mol_type = other RNA
gtgaagaggagtgtaggaaaga

SEQ ID NO: 12923 - RNA, 22 nt, synthetic construct
  source 1..22: mol_type = other RNA
gtgaagaggcgttgggggaggg

SEQ ID NO: 12924 - RNA, 22 nt, synthetic construct
  source 1..22: mol_type = other RNA
gtgacagacaactctgatcgct

SEQ ID NO: 12925 - RNA, 22 nt, synthetic construct
  source 1..22: mol_type = other RNA
gtgacccttccctcccctgggg

SEQ ID NO: 12926 - RNA, 22 nt, synthetic construct
  source 1..22: mol_type = other RNA
gtgagaagtggcagcatcctcc

SEQ ID NO: 12927 - RNA, 22 nt, synthetic construct
  source 1..22: mol_type = other RNA
gtgagaatatcttcaaaggcag

SEQ ID NO: 12928 - RNA, 22 nt, synthetic construct
  source 1..22: mol_type = other RNA
gtgagacaagcaaggactctat

SEQ ID NO: 12929 - RNA, 22 nt, synthetic construct
  source 1..22: mol_type = other RNA
gtgagactcgagccagtagcaa

SEQ ID NO: 12930 - RNA, 22 nt, synthetic construct
  source 1..22: mol_type = other RNA
gtgaggtgggggtggggggcag

SEQ ID NO: 12931 - RNA, 22 nt, synthetic construct
  source 1..22: mol_type = other RNA
gtgaggttcggtctcttttctg

SEQ ID NO: 12932 - RNA, 22 nt, synthetic construct
  source 1..22: mol_type = other RNA
gtgagtctctgagcgcaggcgg

SEQ ID NO: 12933 - RNA, 22 nt, synthetic construct
  source 1..22: mol_type = other RNA
gtgcaaggcggcgaggggggtg

SEQ ID NO: 12934 - RNA, 22 nt, synthetic construct
  source 1..22: mol_type = other RNA
gtgccacagcgtgtctgagata

SEQ ID NO: 12935 - RNA, 22 nt, synthetic construct
  source 1..22: mol_type = other RNA
gtgcccctggcgccggcgctgg

SEQ ID NO: 12936 - RNA, 22 nt, synthetic construct
  source 1..22: mol_type = other RNA
gtgccggcccccctctttccct

SEQ ID NO: 12937 - RNA, 22 nt, synthetic construct
  source 1..22: mol_type = other RNA
gtgcctgtagcaggtcgggctt

SEQ ID NO: 12938 - RNA, 22 nt, synthetic construct
  source 1..22: mol_type = other RNA
gtgcggggcggtgggcggagag

SEQ ID NO: 12939 - RNA, 22 nt, synthetic construct
  source 1..22: mol_type = other RNA
gtgcggtacactggggggatgg

SEQ ID NO: 12940 - RNA, 22 nt, synthetic construct
  source 1..22: mol_type = other RNA
gtgcggtcagtggcgtttccgc

SEQ ID NO: 12941 - RNA, 22 nt, synthetic construct
  source 1..22: mol_type = other RNA
gtgcttcggcgctccggctcct

SEQ ID NO: 12942 - RNA, 22 nt, synthetic construct
  source 1..22: mol_type = other RNA
gtggagaacgatcttgtgagaa

SEQ ID NO: 12943 - RNA, 22 nt, synthetic construct
  source 1..22: mol_type = other RNA
gtggagtaggcagttcccagga

SEQ ID NO: 12944 - RNA, 22 nt, synthetic construct
  source 1..22: mol_type = other RNA
gtggcacacgccacggggagcc

SEQ ID NO: 12945 - RNA, 22 nt, synthetic construct
  source 1..22: mol_type = other RNA
gtggcagcatcctcctaagagc

SEQ ID NO: 12946 - RNA, 22 nt, synthetic construct
  source 1..22: mol_type = other RNA
gtggcaggaagcgcgcgctgga

SEQ ID NO: 12947 - RNA, 22 nt, synthetic construct
  source 1..22: mol_type = other RNA
gtggcgaaggtaatgcctttgg

SEQ ID NO: 12948 - RNA, 22 nt, synthetic construct
  source 1..22: mol_type = other RNA
gtggcgccgcgttgggcctaac

SEQ ID NO: 12949 - RNA, 22 nt, synthetic construct
  source 1..22: mol_type = other RNA
gtggcggggaggcgggcgttgg

SEQ ID NO: 12950 - RNA, 22 nt, synthetic construct
  source 1..22: mol_type = other RNA
gtggcgtgtgccacagcgtgtc

SEQ ID NO: 12951 - RNA, 22 nt, synthetic construct
  source 1..22: mol_type = other RNA
gtggcgtttccgctcgggcagc

SEQ ID NO: 12952 - RNA, 22 nt, synthetic construct
  source 1..22: mol_type = other RNA
gtggctaggggggccgtctggt

SEQ ID NO: 12953 - RNA, 22 nt, synthetic construct
  source 1..22: mol_type = other RNA
gtggctggatgcaggcgggagg

SEQ ID NO: 12954 - RNA, 22 nt, synthetic construct
  source 1..22: mol_type = other RNA
gtggcttgcgggggttgccttt

SEQ ID NO: 12955 - RNA, 22 nt, synthetic construct
  source 1..22: mol_type = other RNA
gtgggaagccagaaaacgagag

SEQ ID NO: 12956 - RNA, 22 nt, synthetic construct
  source 1..22: mol_type = other RNA
gtgggaagtcgggaacataatg

SEQ ID NO: 12957 - RNA, 22 nt, synthetic construct
  source 1..22: mol_type = other RNA
gtgggaccgggcccttgctact

SEQ ID NO: 12958 - RNA, 22 nt, synthetic construct
  source 1..22: mol_type = other RNA
gtgggaggacgcccgcgccaga

SEQ ID NO: 12959 - RNA, 22 nt, synthetic construct
  source 1..22: mol_type = other RNA
gtgggaggggaggtgcggtaca

SEQ ID NO: 12960 - RNA, 22 nt, synthetic construct
  source 1..22: mol_type = other RNA
gtgggccaatgggtgcggggcg

SEQ ID NO: 12961 - RNA, 22 nt, synthetic construct
  source 1..22: mol_type = other RNA
gtgggcctggccctccccaagc

SEQ ID NO: 12962 - RNA, 22 nt, synthetic construct
  source 1..22: mol_type = other RNA
gtgggcggagaggccaatggcg

SEQ ID NO: 12963 - RNA, 22 nt, synthetic construct
  source 1..22: mol_type = other RNA
gtggggcgggtaggtaggtggg

SEQ ID NO: 12964 - RNA, 22 nt, synthetic construct
  source 1..22: mol_type = other RNA
gtgggggaggagcgggggtcgg

SEQ ID NO: 12965 - RNA, 22 nt, synthetic construct
  source 1..22: mol_type = other RNA
gtggggggcagaaaggcggagc

SEQ ID NO: 12966 - RNA, 22 nt, synthetic construct
  source 1..22: mol_type = other RNA
gtgggggtggcgaaggtaatgc

SEQ ID NO: 12967 - RNA, 22 nt, synthetic construct
  source 1..22: mol_type = other RNA
gtgggggtgggggaggagcggg

SEQ ID NO: 12968 - RNA, 22 nt, synthetic construct
  source 1..22: mol_type = other RNA
gtgggggtggggggcagaaagg

SEQ ID NO: 12969 - RNA, 22 nt, synthetic construct
  source 1..22: mol_type = other RNA
gtggggtgtagagatgctgggt

SEQ ID NO: 12970 - RNA, 22 nt, synthetic construct
  source 1..22: mol_type = other RNA
gtggtctttctcttggatatgg

SEQ ID NO: 12971 - RNA, 22 nt, synthetic construct
  source 1..22: mol_type = other RNA
gtggtgggggtggcgaaggtaa

SEQ ID NO: 12972 - RNA, 22 nt, synthetic construct
  source 1..22: mol_type = other RNA
gtggtttcgctcatgtgagact

SEQ ID NO: 12973 - RNA, 22 nt, synthetic construct
  source 1..22: mol_type = other RNA
gtgtaagtcgggaatgtgaaga

SEQ ID NO: 12974 - RNA, 22 nt, synthetic construct
  source 1..22: mol_type = other RNA
gtgtaccgcacctcccctccca

SEQ ID NO: 12975 - RNA, 22 nt, synthetic construct
  source 1..22: mol_type = other RNA
gtgtagagatgctgggtgtgcg

SEQ ID NO: 12976 - RNA, 22 nt, synthetic construct
  source 1..22: mol_type = other RNA
gtgtaggaaagagccctggttc

SEQ ID NO: 12977 - RNA, 22 nt, synthetic construct
  source 1..22: mol_type = other RNA
gtgtagggttcgagcctggagt

SEQ ID NO: 12978 - RNA, 22 nt, synthetic construct
  source 1..22: mol_type = other RNA
gtgtatttcgagcggagggcag

SEQ ID NO: 12979 - RNA, 22 nt, synthetic construct
  source 1..22: mol_type = other RNA
gtgtcgaagacaagcaggcggc

SEQ ID NO: 12980 - RNA, 22 nt, synthetic construct
  source 1..22: mol_type = other RNA
gtgtcgttttacttgccttggg

SEQ ID NO: 12981 - RNA, 22 nt, synthetic construct
  source 1..22: mol_type = other RNA
gtgtctgagatagcctcgttga

SEQ ID NO: 12982 - RNA, 22 nt, synthetic construct
  source 1..22: mol_type = other RNA
gtgtctggccccgcgcccctgc

SEQ ID NO: 12983 - RNA, 22 nt, synthetic construct
  source 1..22: mol_type = other RNA
gtgtgaaaacacaaatggcgta

SEQ ID NO: 12984 - RNA, 22 nt, synthetic construct
  source 1..22: mol_type = other RNA
gtgtgcaaggcggcgagggggg

SEQ ID NO: 12985 - RNA, 22 nt, synthetic construct
  source 1..22: mol_type = other RNA
gtgtgccacagcgtgtctgaga

SEQ ID NO: 12986 - RNA, 22 nt, synthetic construct
  source 1..22: mol_type = other RNA
gtgtggtgggggtggcgaaggt

SEQ ID NO: 12987 - RNA, 22 nt, synthetic construct
  source 1..22: mol_type = other RNA
gtgtgtgaaaacacaaatggcg

SEQ ID NO: 12988 - RNA, 22 nt, synthetic construct
  source 1..22: mol_type = other RNA
gtgtgtgcaaggcggcgagggg

SEQ ID NO: 12989 - RNA, 22 nt, synthetic construct
  source 1..22: mol_type = other RNA
gtgttgcaacggtgtgtgcaag

SEQ ID NO: 12990 - RNA, 22 nt, synthetic construct
  source 1..22: mol_type = other RNA
gtgttggcggactggcgggact

SEQ ID NO: 12991 - RNA, 22 nt, synthetic construct
  source 1..22: mol_type = other RNA
gtgttttcacacacggcgggag

SEQ ID NO: 12992 - RNA, 22 nt, synthetic construct
  source 1..22: mol_type = other RNA
gttaaactgttgggaaagcccc

SEQ ID NO: 12993 - RNA, 22 nt, synthetic construct
  source 1..22: mol_type = other RNA
gttacgccgtcgggagtacgca

SEQ ID NO: 12994 - RNA, 22 nt, synthetic construct
  source 1..22: mol_type = other RNA
gttacgttgggagggaaagggg

SEQ ID NO: 12995 - RNA, 22 nt, synthetic construct
  source 1..22: mol_type = other RNA
gttaggcccaacgcggcgccac

SEQ ID NO: 12996 - RNA, 22 nt, synthetic construct
  source 1..22: mol_type = other RNA
gttcaagtaggtaaatcgcatg

SEQ ID NO: 12997 - RNA, 22 nt, synthetic construct
  source 1..22: mol_type = other RNA
gttcccaccgcctgaagggcga

SEQ ID NO: 12998 - RNA, 22 nt, synthetic construct
  source 1..22: mol_type = other RNA
gttcccaggaaagggggtgaag

SEQ ID NO: 12999 - RNA, 22 nt, synthetic construct
  source 1..22: mol_type = other RNA
gttcccgacttcccacgggaaa

SEQ ID NO: 13000 - RNA, 22 nt, synthetic construct
  source 1..22: mol_type = other RNA
gttccgctcccctacctagccg

SEQ ID NO: 13001 - RNA, 22 nt, synthetic construct
  source 1..22: mol_type = other RNA
gttcgagcctggagttgagcca

SEQ ID NO: 13002 - RNA, 22 nt, synthetic construct
  source 1..22: mol_type = other RNA
gttcggtctcttttctgtcgga

SEQ ID NO: 13003 - RNA, 22 nt, synthetic construct
  source 1..22: mol_type = other RNA
gttctccacgcccaaggcaagt

SEQ ID NO: 13004 - RNA, 22 nt, synthetic construct
  source 1..22: mol_type = other RNA
gttctcgcggccttgtgacaga

SEQ ID NO: 13005 - RNA, 22 nt, synthetic construct
  source 1..22: mol_type = other RNA
gttctctggctccccgtggcgt

SEQ ID NO: 13006 - RNA, 22 nt, synthetic construct
  source 1..22: mol_type = other RNA
gttgaatgtgtagggttcgagc

SEQ ID NO: 13007 - RNA, 22 nt, synthetic construct
  source 1..22: mol_type = other RNA
gttgagccagattgtgtcgttt

SEQ ID NO: 13008 - RNA, 22 nt, synthetic construct
  source 1..22: mol_type = other RNA
gttgcaacaccccattttccca

SEQ ID NO: 13009 - RNA, 22 nt, synthetic construct
  source 1..22: mol_type = other RNA
gttgcaacggtgtgtgcaaggc

SEQ ID NO: 13010 - RNA, 22 nt, synthetic construct
  source 1..22: mol_type = other RNA
gttgccccctgggtggggcggg

SEQ ID NO: 13011 - RNA, 22 nt, synthetic construct
  source 1..22: mol_type = other RNA
gttgccgcagggcgggcctccc

SEQ ID NO: 13012 - RNA, 22 nt, synthetic construct
  source 1..22: mol_type = other RNA
gttgcctttcccgtgggaagtc

SEQ ID NO: 13013 - RNA, 22 nt, synthetic construct
  source 1..22: mol_type = other RNA
gttgcgcaggggcgcggggcca

SEQ ID NO: 13014 - RNA, 22 nt, synthetic construct
  source 1..22: mol_type = other RNA
gttggagtaaagctcctgtcag

SEQ ID NO: 13015 - RNA, 22 nt, synthetic construct
  source 1..22: mol_type = other RNA
gttggcggactggcgggactgg

SEQ ID NO: 13016 - RNA, 22 nt, synthetic construct
  source 1..22: mol_type = other RNA
gttgggaaagccccttctatgc

SEQ ID NO: 13017 - RNA, 22 nt, synthetic construct
  source 1..22: mol_type = other RNA
gttgggagggaaaggggtggct

SEQ ID NO: 13018 - RNA, 22 nt, synthetic construct
  source 1..22: mol_type = other RNA
gttgggcctaactcgagtcctg

SEQ ID NO: 13019 - RNA, 22 nt, synthetic construct
  source 1..22: mol_type = other RNA
gttgggggaggggaagcgtcct

SEQ ID NO: 13020 - RNA, 22 nt, synthetic construct
  source 1..22: mol_type = other RNA
gttgggtcgcctagattagagg

SEQ ID NO: 13021 - RNA, 22 nt, synthetic construct
  source 1..22: mol_type = other RNA
gttggtacggtcctccccgagg

SEQ ID NO: 13022 - RNA, 22 nt, synthetic construct
  source 1..22: mol_type = other RNA
gttgtctgtcacaaggccgcga

SEQ ID NO: 13023 - RNA, 22 nt, synthetic construct
  source 1..22: mol_type = other RNA
gtttaactttccctctcatgcg

SEQ ID NO: 13024 - RNA, 22 nt, synthetic construct
  source 1..22: mol_type = other RNA
gtttacccgccgcctgcttgtc

SEQ ID NO: 13025 - RNA, 22 nt, synthetic construct
  source 1..22: mol_type = other RNA
gtttacctttcccttgaggaga

SEQ ID NO: 13026 - RNA, 22 nt, synthetic construct
  source 1..22: mol_type = other RNA
gtttccgctcgggcagcgggct

SEQ ID NO: 13027 - RNA, 22 nt, synthetic construct
  source 1..22: mol_type = other RNA
gtttcctggccgggaatggccc

SEQ ID NO: 13028 - RNA, 22 nt, synthetic construct
  source 1..22: mol_type = other RNA
gtttcgagcattttccgctccc

SEQ ID NO: 13029 - RNA, 22 nt, synthetic construct
  source 1..22: mol_type = other RNA
gtttcgctcatgtgagactcga

SEQ ID NO: 13030 - RNA, 22 nt, synthetic construct
  source 1..22: mol_type = other RNA
gtttctcctcccgccgtgtgtg

SEQ ID NO: 13031 - RNA, 22 nt, synthetic construct
  source 1..22: mol_type = other RNA
gtttgttacgttgggagggaaa

SEQ ID NO: 13032 - RNA, 22 nt, synthetic construct
  source 1..22: mol_type = other RNA
gttttacttgccttgggcgtgg

SEQ ID NO: 13033 - RNA, 22 nt, synthetic construct
  source 1..22: mol_type = other RNA
gttttcacacacggcgggagga

SEQ ID NO: 13034 - RNA, 22 nt, synthetic construct
  source 1..22: mol_type = other RNA
gttttctggcttcccacctcag

SEQ ID NO: 13035 - RNA, 22 nt, synthetic construct
  source 1..22: mol_type = other RNA
gtttttcctgggtcaggacgct

SEQ ID NO: 13036 - RNA, 22 nt, synthetic construct
  source 1..22: mol_type = other RNA
taaaacgacacaatctggctca

SEQ ID NO: 13037 - RNA, 22 nt, synthetic construct
  source 1..22: mol_type = other RNA
taaaccgactcccccgaaggaa

SEQ ID NO: 13038 - RNA, 22 nt, synthetic construct
  source 1..22: mol_type = other RNA
taaacgtggagtaggcagttcc

SEQ ID NO: 13039 - RNA, 22 nt, synthetic construct
  source 1..22: mol_type = other RNA
taaactgttgggaaagcccctt

SEQ ID NO: 13040 - RNA, 22 nt, synthetic construct
  source 1..22: mol_type = other RNA
taaagctcctgtcagttacgcc

SEQ ID NO: 13041 - RNA, 22 nt, synthetic construct
  source 1..22: mol_type = other RNA
taaagggaatatttttctgcct

SEQ ID NO: 13042 - RNA, 22 nt, synthetic construct
  source 1..22: mol_type = other RNA
taaatcgcatgagagggaaagt

SEQ ID NO: 13043 - RNA, 22 nt, synthetic construct
  source 1..22: mol_type = other RNA
taacaaacattatgttcccgac

SEQ ID NO: 13044 - RNA, 22 nt, synthetic construct
  source 1..22: mol_type = other RNA
taactcgagtcctgccgcctcc

SEQ ID NO: 13045 - RNA, 22 nt, synthetic construct
  source 1..22: mol_type = other RNA
taactgacaggagctttactcc

SEQ ID NO: 13046 - RNA, 22 nt, synthetic construct
  source 1..22: mol_type = other RNA
taactttccctctcatgcgatt

SEQ ID NO: 13047 - RNA, 22 nt, synthetic construct
  source 1..22: mol_type = other RNA
taagagcttggggagggccagg

SEQ ID NO: 13048 - RNA, 22 nt, synthetic construct
  source 1..22: mol_type = other RNA
taagcggctgcgtactcccgac

SEQ ID NO: 13049 - RNA, 22 nt, synthetic construct
  source 1..22: mol_type = other RNA
taagggtccgacagaaaagaga

SEQ ID NO: 13050 - RNA, 22 nt, synthetic construct
  source 1..22: mol_type = other RNA
taagtcgggaatgtgaagagga

SEQ ID NO: 13051 - RNA, 22 nt, synthetic construct
  source 1..22: mol_type = other RNA
taatctaggcgacccaactccc

SEQ ID NO: 13052 - RNA, 22 nt, synthetic construct
  source 1..22: mol_type = other RNA
taatcttcctggacgccttccc

SEQ ID NO: 13053 - RNA, 22 nt, synthetic construct
  source 1..22: mol_type = other RNA
taatgcctttgggaagcagcca

SEQ ID NO: 13054 - RNA, 22 nt, synthetic construct
  source 1..22: mol_type = other RNA
taatgtttgttacgttgggagg

SEQ ID NO: 13055 - RNA, 22 nt, synthetic construct
  source 1..22: mol_type = other RNA
taattgattctatagagtcctt

SEQ ID NO: 13056 - RNA, 22 nt, synthetic construct
  source 1..22: mol_type = other RNA
tacacattcaacgaggctatct

SEQ ID NO: 13057 - RNA, 22 nt, synthetic construct
  source 1..22: mol_type = other RNA
tacaccccacctacctacccgc

SEQ ID NO: 13058 - RNA, 22 nt, synthetic construct
  source 1..22: mol_type = other RNA
tacacgcagagggaaagagaat

SEQ ID NO: 13059 - RNA, 22 nt, synthetic construct
  source 1..22: mol_type = other RNA
tacactcctcttcacattcccg

SEQ ID NO: 13060 - RNA, 22 nt, synthetic construct
  source 1..22: mol_type = other RNA
tacactggggggatgggtggct

SEQ ID NO: 13061 - RNA, 22 nt, synthetic construct
  source 1..22: mol_type = other RNA
tacaggcactcgtgggggtggg

SEQ ID NO: 13062 - RNA, 22 nt, synthetic construct
  source 1..22: mol_type = other RNA
taccaacgcccgcctccccgcc

SEQ ID NO: 13063 - RNA, 22 nt, synthetic construct
  source 1..22: mol_type = other RNA
tacccccgttctcgcggccttg

SEQ ID NO: 13064 - RNA, 22 nt, synthetic construct
  source 1..22: mol_type = other RNA
tacccgccccacccagggggca

SEQ ID NO: 13065 - RNA, 22 nt, synthetic construct
  source 1..22: mol_type = other RNA
tacccgccgcctgcttgtcttc

SEQ ID NO: 13066 - RNA, 22 nt, synthetic construct
  source 1..22: mol_type = other RNA
tacccgtgaggtgggggtgggg

SEQ ID NO: 13067 - RNA, 22 nt, synthetic construct
  source 1..22: mol_type = other RNA
taccgcacctcccctcccacca

SEQ ID NO: 13068 - RNA, 22 nt, synthetic construct
  source 1..22: mol_type = other RNA
tacctacccgccccacccaggg

SEQ ID NO: 13069 - RNA, 22 nt, synthetic construct
  source 1..22: mol_type = other RNA
tacctacttgaaccagggctct

SEQ ID NO: 13070 - RNA, 22 nt, synthetic construct
  source 1..22: mol_type = other RNA
tacctagccgaggctctctgag

SEQ ID NO: 13071 - RNA, 22 nt, synthetic construct
  source 1..22: mol_type = other RNA
taccttcgccacccccaccaca

SEQ ID NO: 13072 - RNA, 22 nt, synthetic construct
  source 1..22: mol_type = other RNA
taccttgtcccaggcgctgccg

SEQ ID NO: 13073 - RNA, 22 nt, synthetic construct
  source 1..22: mol_type = other RNA
tacctttcccttgaggagaggc

SEQ ID NO: 13074 - RNA, 22 nt, synthetic construct
  source 1..22: mol_type = other RNA
tacgcagccgcttagcgactct

SEQ ID NO: 13075 - RNA, 22 nt, synthetic construct
  source 1..22: mol_type = other RNA
tacgccatttgtgttttcacac

SEQ ID NO: 13076 - RNA, 22 nt, synthetic construct
  source 1..22: mol_type = other RNA
tacgccgtcgggagtacgcagc

SEQ ID NO: 13077 - RNA, 22 nt, synthetic construct
  source 1..22: mol_type = other RNA
tacggaggggagatcgcggccc

SEQ ID NO: 13078 - RNA, 22 nt, synthetic construct
  source 1..22: mol_type = other RNA
tacgggccattcccggccagga

SEQ ID NO: 13079 - RNA, 22 nt, synthetic construct
  source 1..22: mol_type = other RNA
tacggtcctccccgaggccgag

SEQ ID NO: 13080 - RNA, 22 nt, synthetic construct
  source 1..22: mol_type = other RNA
tacgttgggagggaaaggggtg

SEQ ID NO: 13081 - RNA, 22 nt, synthetic construct
  source 1..22: mol_type = other RNA
tactccaaccagaatacgccat

SEQ ID NO: 13082 - RNA, 22 nt, synthetic construct
  source 1..22: mol_type = other RNA
tactccacgtttacctttccct

SEQ ID NO: 13083 - RNA, 22 nt, synthetic construct
  source 1..22: mol_type = other RNA
tactcccgacggcgtaactgac

SEQ ID NO: 13084 - RNA, 22 nt, synthetic construct
  source 1..22: mol_type = other RNA
tactggctcgagtctcacatga

SEQ ID NO: 13085 - RNA, 22 nt, synthetic construct
  source 1..22: mol_type = other RNA
tactgtgttggcggactggcgg

SEQ ID NO: 13086 - RNA, 22 nt, synthetic construct
  source 1..22: mol_type = other RNA
tacttgaaccagggctctttcc

SEQ ID NO: 13087 - RNA, 22 nt, synthetic construct
  source 1..22: mol_type = other RNA
tacttgccttgggcgtggagaa

SEQ ID NO: 13088 - RNA, 22 nt, synthetic construct
  source 1..22: mol_type = other RNA
tagaaggggctttcccaacagt

SEQ ID NO: 13089 - RNA, 22 nt, synthetic construct
  source 1..22: mol_type = other RNA
tagaatcaattagcatagaagg

SEQ ID NO: 13090 - RNA, 22 nt, synthetic construct
  source 1..22: mol_type = other RNA
tagagaagaggctgtgcttcgg

SEQ ID NO: 13091 - RNA, 22 nt, synthetic construct
  source 1..22: mol_type = other RNA
tagagatgctgggtgtgcgggc

SEQ ID NO: 13092 - RNA, 22 nt, synthetic construct
  source 1..22: mol_type = other RNA
tagagggggatctctctccctg

SEQ ID NO: 13093 - RNA, 22 nt, synthetic construct
  source 1..22: mol_type = other RNA
tagagtccttgcttgtctcact

SEQ ID NO: 13094 - RNA, 22 nt, synthetic construct
  source 1..22: mol_type = other RNA
tagattagagggggatctctct

SEQ ID NO: 13095 - RNA, 22 nt, synthetic construct
  source 1..22: mol_type = other RNA
tagcaagggcccggtcccacag

SEQ ID NO: 13096 - RNA, 22 nt, synthetic construct
  source 1..22: mol_type = other RNA
tagcaggtcgggcttgtctcgc

SEQ ID NO: 13097 - RNA, 22 nt, synthetic construct
  source 1..22: mol_type = other RNA
tagcatagaaggggctttccca

SEQ ID NO: 13098 - RNA, 22 nt, synthetic construct
  source 1..22: mol_type = other RNA
tagccacccatccccccagtgt

SEQ ID NO: 13099 - RNA, 22 nt, synthetic construct
  source 1..22: mol_type = other RNA
tagccgaggctctctgaggagc

SEQ ID NO: 13100 - RNA, 22 nt, synthetic construct
  source 1..22: mol_type = other RNA
tagccggaagcgctcctccctc

SEQ ID NO: 13101 - RNA, 22 nt, synthetic construct
  source 1..22: mol_type = other RNA
tagcctcgttgaatgtgtaggg

SEQ ID NO: 13102 - RNA, 22 nt, synthetic construct
  source 1..22: mol_type = other RNA
tagcctcttgtcgccgattggc

SEQ ID NO: 13103 - RNA, 22 nt, synthetic construct
  source 1..22: mol_type = other RNA
tagcgactctcgcgttgccccc

SEQ ID NO: 13104 - RNA, 22 nt, synthetic construct
  source 1..22: mol_type = other RNA
taggaaagagccctggttcaag

SEQ ID NO: 13105 - RNA, 22 nt, synthetic construct
  source 1..22: mol_type = other RNA
taggaggatgctgccacttctc

SEQ ID NO: 13106 - RNA, 22 nt, synthetic construct
  source 1..22: mol_type = other RNA
taggcagttcccaggaaagggg

SEQ ID NO: 13107 - RNA, 22 nt, synthetic construct
  source 1..22: mol_type = other RNA
taggcccaacgcggcgccacgg

SEQ ID NO: 13108 - RNA, 22 nt, synthetic construct
  source 1..22: mol_type = other RNA
taggcgacccaactcccccttt

SEQ ID NO: 13109 - RNA, 22 nt, synthetic construct
  source 1..22: mol_type = other RNA
taggcggccccggcggcttccg

SEQ ID NO: 13110 - RNA, 22 nt, synthetic construct
  source 1..22: mol_type = other RNA
tagggagtgggggatcggggag

SEQ ID NO: 13111 - RNA, 22 nt, synthetic construct
  source 1..22: mol_type = other RNA
taggggagcggaactctggtgg

SEQ ID NO: 13112 - RNA, 22 nt, synthetic construct
  source 1..22: mol_type = other RNA
taggggggccgtctggtggctt

SEQ ID NO: 13113 - RNA, 22 nt, synthetic construct
  source 1..22: mol_type = other RNA
tagggttcgagcctggagttga

SEQ ID NO: 13114 - RNA, 22 nt, synthetic construct
  source 1..22: mol_type = other RNA
taggtaaatcgcatgagaggga

SEQ ID NO: 13115 - RNA, 22 nt, synthetic construct
  source 1..22: mol_type = other RNA
taggtaggggagcggaactctg

SEQ ID NO: 13116 - RNA, 22 nt, synthetic construct
  source 1..22: mol_type = other RNA
taggtaggtggggtgtagagat

SEQ ID NO: 13117 - RNA, 22 nt, synthetic construct
  source 1..22: mol_type = other RNA
taggtggggtgtagagatgctg

SEQ ID NO: 13118 - RNA, 22 nt, synthetic construct
  source 1..22: mol_type = other RNA
tagtgccggcccccctctttcc

SEQ ID NO: 13119 - RNA, 22 nt, synthetic construct
  source 1..22: mol_type = other RNA
tatagaatcaattagcatagaa

SEQ ID NO: 13120 - RNA, 22 nt, synthetic construct
  source 1..22: mol_type = other RNA
tatagagtccttgcttgtctca

SEQ ID NO: 13121 - RNA, 22 nt, synthetic construct
  source 1..22: mol_type = other RNA
tatccaagagaaagaccactga

SEQ ID NO: 13122 - RNA, 22 nt, synthetic construct
  source 1..22: mol_type = other RNA
tatctcagacacgctgtggcac

SEQ ID NO: 13123 - RNA, 22 nt, synthetic construct
  source 1..22: mol_type = other RNA
tatcttcaaaggcagaaaaata

SEQ ID NO: 13124 - RNA, 22 nt, synthetic construct
  source 1..22: mol_type = other RNA
tatgaattctctttccctctgc

SEQ ID NO: 13125 - RNA, 22 nt, synthetic construct
  source 1..22: mol_type = other RNA
tatgcctgtgtatttcgagcgg

SEQ ID NO: 13126 - RNA, 22 nt, synthetic construct
  source 1..22: mol_type = other RNA
tatgctaattgattctatagag

SEQ ID NO: 13127 - RNA, 22 nt, synthetic construct
  source 1..22: mol_type = other RNA
tatgttcccgacttcccacggg

SEQ ID NO: 13128 - RNA, 22 nt, synthetic construct
  source 1..22: mol_type = other RNA
tattccctttatgaattctctt

SEQ ID NO: 13129 - RNA, 22 nt, synthetic construct
  source 1..22: mol_type = other RNA
tattctcacaagatcgttctcc

SEQ ID NO: 13130 - RNA, 22 nt, synthetic construct
  source 1..22: mol_type = other RNA
tattctggttggagtaaagctc

SEQ ID NO: 13131 - RNA, 22 nt, synthetic construct
  source 1..22: mol_type = other RNA
tatttcgagcggagggcagcaa

SEQ ID NO: 13132 - RNA, 22 nt, synthetic construct
  source 1..22: mol_type = other RNA
tatttttctgcctttgaagata

SEQ ID NO: 13133 - RNA, 22 nt, synthetic construct
  source 1..22: mol_type = other RNA
tcaaaggcagaaaaatattccc

SEQ ID NO: 13134 - RNA, 22 nt, synthetic construct
  source 1..22: mol_type = other RNA
tcaacgaggctatctcagacac

SEQ ID NO: 13135 - RNA, 22 nt, synthetic construct
  source 1..22: mol_type = other RNA
tcaactccaggctcgaacccta

SEQ ID NO: 13136 - RNA, 22 nt, synthetic construct
  source 1..22: mol_type = other RNA
tcaagggaaaggtaaacgtgga

SEQ ID NO: 13137 - RNA, 22 nt, synthetic construct
  source 1..22: mol_type = other RNA
tcaagtaggtaaatcgcatgag

SEQ ID NO: 13138 - RNA, 22 nt, synthetic construct
  source 1..22: mol_type = other RNA
tcaattagcatagaaggggctt

SEQ ID NO: 13139 - RNA, 22 nt, synthetic construct
  source 1..22: mol_type = other RNA
tcacaagatcgttctccacgcc

SEQ ID NO: 13140 - RNA, 22 nt, synthetic construct
  source 1..22: mol_type = other RNA
tcacaaggccgcgagaacgggg

SEQ ID NO: 13141 - RNA, 22 nt, synthetic construct
  source 1..22: mol_type = other RNA
tcacacacggcgggaggagaaa

SEQ ID NO: 13142 - RNA, 22 nt, synthetic construct
  source 1..22: mol_type = other RNA
tcacatgagcgaaaccactgcg

SEQ ID NO: 13143 - RNA, 22 nt, synthetic construct
  source 1..22: mol_type = other RNA
tcacattcccgacttacacgca

SEQ ID NO: 13144 - RNA, 22 nt, synthetic construct
  source 1..22: mol_type = other RNA
tcacccccctcgccgccttgca

SEQ ID NO: 13145 - RNA, 22 nt, synthetic construct
  source 1..22: mol_type = other RNA
tcaccccctttcctgggaactg

SEQ ID NO: 13146 - RNA, 22 nt, synthetic construct
  source 1..22: mol_type = other RNA
tcacctcctccgtctccccgcg

SEQ ID NO: 13147 - RNA, 22 nt, synthetic construct
  source 1..22: mol_type = other RNA
tcacgatcgggccccaggggag

SEQ ID NO: 13148 - RNA, 22 nt, synthetic construct
  source 1..22: mol_type = other RNA
tcacgcagccccagtcccgcca

SEQ ID NO: 13149 - RNA, 22 nt, synthetic construct
  source 1..22: mol_type = other RNA
tcacgggtacgggccattcccg

SEQ ID NO: 13150 - RNA, 22 nt, synthetic construct
  source 1..22: mol_type = other RNA
tcactcagcccgctgcccgagc

SEQ ID NO: 13151 - RNA, 22 nt, synthetic construct
  source 1..22: mol_type = other RNA
tcactgaccctcccctcccgcc

SEQ ID NO: 13152 - RNA, 22 nt, synthetic construct
  source 1..22: mol_type = other RNA
tcacttcttgggcgtcagtggt

SEQ ID NO: 13153 - RNA, 22 nt, synthetic construct
  source 1..22: mol_type = other RNA
tcagacacgctgtggcacacgc

SEQ ID NO: 13154 - RNA, 22 nt, synthetic construct
  source 1..22: mol_type = other RNA
tcagagactcacgcagccccag

SEQ ID NO: 13155 - RNA, 22 nt, synthetic construct
  source 1..22: mol_type = other RNA
tcagagagcctcggctaggtag

SEQ ID NO: 13156 - RNA, 22 nt, synthetic construct
  source 1..22: mol_type = other RNA
tcagagttgtctgtcacaaggc

SEQ ID NO: 13157 - RNA, 22 nt, synthetic construct
  source 1..22: mol_type = other RNA
tcagatggctgcttcccaaagg

SEQ ID NO: 13158 - RNA, 22 nt, synthetic construct
  source 1..22: mol_type = other RNA
tcagcccgctgcccgagcggaa

SEQ ID NO: 13159 - RNA, 22 nt, synthetic construct
  source 1..22: mol_type = other RNA
tcagcggaagccgccggggccg

SEQ ID NO: 13160 - RNA, 22 nt, synthetic construct
  source 1..22: mol_type = other RNA
tcaggacgcttcccctccccca

SEQ ID NO: 13161 - RNA, 22 nt, synthetic construct
  source 1..22: mol_type = other RNA
tcaggcggtgggaacccggggc

SEQ ID NO: 13162 - RNA, 22 nt, synthetic construct
  source 1..22: mol_type = other RNA
tcaggtgtcgaagacaagcagg

SEQ ID NO: 13163 - RNA, 22 nt, synthetic construct
  source 1..22: mol_type = other RNA
tcagtgaaatcggctctggcgc

SEQ ID NO: 13164 - RNA, 22 nt, synthetic construct
  source 1..22: mol_type = other RNA
tcagtggcgtttccgctcgggc

SEQ ID NO: 13165 - RNA, 22 nt, synthetic construct
  source 1..22: mol_type = other RNA
tcagtggtctttctcttggata

SEQ ID NO: 13166 - RNA, 22 nt, synthetic construct
  source 1..22: mol_type = other RNA
tcagttacgccgtcgggagtac

SEQ ID NO: 13167 - RNA, 22 nt, synthetic construct
  source 1..22: mol_type = other RNA
tcataaagggaatatttttctg

SEQ ID NO: 13168 - RNA, 22 nt, synthetic construct
  source 1..22: mol_type = other RNA
tcatgcgatttacctacttgaa

SEQ ID NO: 13169 - RNA, 22 nt, synthetic construct
  source 1..22: mol_type = other RNA
tcatgtgagactcgagccagta

SEQ ID NO: 13170 - RNA, 22 nt, synthetic construct
  source 1..22: mol_type = other RNA
tcatgtttttcctgggtcagga

SEQ ID NO: 13171 - RNA, 22 nt, synthetic construct
  source 1..22: mol_type = other RNA
tccaaccagaatacgccatttg

SEQ ID NO: 13172 - RNA, 22 nt, synthetic construct
  source 1..22: mol_type = other RNA
tccaagagaaagaccactgacg

SEQ ID NO: 13173 - RNA, 22 nt, synthetic construct
  source 1..22: mol_type = other RNA
tccacgcccaaggcaagtaaaa

SEQ ID NO: 13174 - RNA, 22 nt, synthetic construct
  source 1..22: mol_type = other RNA
tccacgtttacctttcccttga

SEQ ID NO: 13175 - RNA, 22 nt, synthetic construct
  source 1..22: mol_type = other RNA
tccagaagtctcggccggcagc

SEQ ID NO: 13176 - RNA, 22 nt, synthetic construct
  source 1..22: mol_type = other RNA
tccagccacccctttccctccc

SEQ ID NO: 13177 - RNA, 22 nt, synthetic construct
  source 1..22: mol_type = other RNA
tccagcgcgcgcttcctgccac

SEQ ID NO: 13178 - RNA, 22 nt, synthetic construct
  source 1..22: mol_type = other RNA
tccaggaagattacggagggga

SEQ ID NO: 13179 - RNA, 22 nt, synthetic construct
  source 1..22: mol_type = other RNA
tccaggctcgaaccctacacat

SEQ ID NO: 13180 - RNA, 22 nt, synthetic construct
  source 1..22: mol_type = other RNA
tccatatccaagagaaagacca

SEQ ID NO: 13181 - RNA, 22 nt, synthetic construct
  source 1..22: mol_type = other RNA
tcccaaaggcattaccttcgcc

SEQ ID NO: 13182 - RNA, 22 nt, synthetic construct
  source 1..22: mol_type = other RNA
tcccaacagtttaactttccct

SEQ ID NO: 13183 - RNA, 22 nt, synthetic construct
  source 1..22: mol_type = other RNA
tcccaacgtaacaaacattatg

SEQ ID NO: 13184 - RNA, 22 nt, synthetic construct
  source 1..22: mol_type = other RNA
tcccacagcttcgacagccaat

SEQ ID NO: 13185 - RNA, 22 nt, synthetic construct
  source 1..22: mol_type = other RNA
tcccaccagagttccgctcccc

SEQ ID NO: 13186 - RNA, 22 nt, synthetic construct
  source 1..22: mol_type = other RNA
tcccaccctccccttccttcgg

SEQ ID NO: 13187 - RNA, 22 nt, synthetic construct
  source 1..22: mol_type = other RNA
tcccaccgcctgaagggcgaga

SEQ ID NO: 13188 - RNA, 22 nt, synthetic construct
  source 1..22: mol_type = other RNA
tcccacctcagatggctgcttc

SEQ ID NO: 13189 - RNA, 22 nt, synthetic construct
  source 1..22: mol_type = other RNA
tcccacgggaaaggcaaccccc

SEQ ID NO: 13190 - RNA, 22 nt, synthetic construct
  source 1..22: mol_type = other RNA
tcccaggaaagggggtgaagag

SEQ ID NO: 13191 - RNA, 22 nt, synthetic construct
  source 1..22: mol_type = other RNA
tcccagggagagagatccccct

SEQ ID NO: 13192 - RNA, 22 nt, synthetic construct
  source 1..22: mol_type = other RNA
tccccaagctcttaggaggatg

SEQ ID NO: 13193 - RNA, 22 nt, synthetic construct
  source 1..22: mol_type = other RNA
tcccccaacgcctcttcacccc

SEQ ID NO: 13194 - RNA, 22 nt, synthetic construct
  source 1..22: mol_type = other RNA
tcccccacccccacgagtgcct

SEQ ID NO: 13195 - RNA, 22 nt, synthetic construct
  source 1..22: mol_type = other RNA
tcccccactccctacccccgtt

SEQ ID NO: 13196 - RNA, 22 nt, synthetic construct
  source 1..22: mol_type = other RNA
tccccccagtgtaccgcacctc

SEQ ID NO: 13197 - RNA, 22 nt, synthetic construct
  source 1..22: mol_type = other RNA
tcccccgaaggaaggggagggt

SEQ ID NO: 13198 - RNA, 22 nt, synthetic construct
  source 1..22: mol_type = other RNA
tccccctccggttgccgcaggg

SEQ ID NO: 13199 - RNA, 22 nt, synthetic construct
  source 1..22: mol_type = other RNA
tccccctctaatctaggcgacc

SEQ ID NO: 13200 - RNA, 22 nt, synthetic construct
  source 1..22: mol_type = other RNA
tccccctttcatgtttttcctg

SEQ ID NO: 13201 - RNA, 22 nt, synthetic construct
  source 1..22: mol_type = other RNA
tccccgaggccgagcgccgcag

SEQ ID NO: 13202 - RNA, 22 nt, synthetic construct
  source 1..22: mol_type = other RNA
tccccgatcccccactccctac

SEQ ID NO: 13203 - RNA, 22 nt, synthetic construct
  source 1..22: mol_type = other RNA
tccccgcctttggctcgctccg

SEQ ID NO: 13204 - RNA, 22 nt, synthetic construct
  source 1..22: mol_type = other RNA
tccccgcgctcgctctccttgg

SEQ ID NO: 13205 - RNA, 22 nt, synthetic construct
  source 1..22: mol_type = other RNA
tccccgtgcggtcagtggcgtt

SEQ ID NO: 13206 - RNA, 22 nt, synthetic construct
  source 1..22: mol_type = other RNA
tccccgtggcgtgtgccacagc

SEQ ID NO: 13207 - RNA, 22 nt, synthetic construct
  source 1..22: mol_type = other RNA
tcccctacctagccgaggctct

SEQ ID NO: 13208 - RNA, 22 nt, synthetic construct
  source 1..22: mol_type = other RNA
tcccctcccaccagagttccgc

SEQ ID NO: 13209 - RNA, 22 nt, synthetic construct
  source 1..22: mol_type = other RNA
tcccctcccccaacgcctcttc

SEQ ID NO: 13210 - RNA, 22 nt, synthetic construct
  source 1..22: mol_type = other RNA
tcccctccgtaatcttcctgga

SEQ ID NO: 13211 - RNA, 22 nt, synthetic construct
  source 1..22: mol_type = other RNA
tcccctggggcccgatcgtgag

SEQ ID NO: 13212 - RNA, 22 nt, synthetic construct
  source 1..22: mol_type = other RNA
tccccttccttcgggggagtcg

SEQ ID NO: 13213 - RNA, 22 nt, synthetic construct
  source 1..22: mol_type = other RNA
tcccgacggcgtaactgacagg

SEQ ID NO: 13214 - RNA, 22 nt, synthetic construct
  source 1..22: mol_type = other RNA
tcccgacttacacgcagaggga

SEQ ID NO: 13215 - RNA, 22 nt, synthetic construct
  source 1..22: mol_type = other RNA
tcccgacttcccacgggaaagg

SEQ ID NO: 13216 - RNA, 22 nt, synthetic construct
  source 1..22: mol_type = other RNA
tcccgccagtccgccaacacag

SEQ ID NO: 13217 - RNA, 22 nt, synthetic construct
  source 1..22: mol_type = other RNA
tcccgccgcgccattggcctct

SEQ ID NO: 13218 - RNA, 22 nt, synthetic construct
  source 1..22: mol_type = other RNA
tcccgccgtgtgtgaaaacaca

SEQ ID NO: 13219 - RNA, 22 nt, synthetic construct
  source 1..22: mol_type = other RNA
tcccgcctgcatccagccaccc

SEQ ID NO: 13220 - RNA, 22 nt, synthetic construct
  source 1..22: mol_type = other RNA
tcccggccaggaaacgccgtgg

SEQ ID NO: 13221 - RNA, 22 nt, synthetic construct
  source 1..22: mol_type = other RNA
tcccgggaggcggcaggactcg

SEQ ID NO: 13222 - RNA, 22 nt, synthetic construct
  source 1..22: mol_type = other RNA
tcccgtgggaagtcgggaacat

SEQ ID NO: 13223 - RNA, 22 nt, synthetic construct
  source 1..22: mol_type = other RNA
tccctacccccgttctcgcggc

SEQ ID NO: 13224 - RNA, 22 nt, synthetic construct
  source 1..22: mol_type = other RNA
tccctcccaacgtaacaaacat

SEQ ID NO: 13225 - RNA, 22 nt, synthetic construct
  source 1..22: mol_type = other RNA
tccctccccctccggttgccgc

SEQ ID NO: 13226 - RNA, 22 nt, synthetic construct
  source 1..22: mol_type = other RNA
tccctcccctggggcccgatcg

SEQ ID NO: 13227 - RNA, 22 nt, synthetic construct
  source 1..22: mol_type = other RNA
tccctcccgcctgcatccagcc

SEQ ID NO: 13228 - RNA, 22 nt, synthetic construct
  source 1..22: mol_type = other RNA
tccctctcatgcgatttaccta

SEQ ID NO: 13229 - RNA, 22 nt, synthetic construct
  source 1..22: mol_type = other RNA
tccctctcgttttctggcttcc

SEQ ID NO: 13230 - RNA, 22 nt, synthetic construct
  source 1..22: mol_type = other RNA
tccctctgcgagagcaatggct

SEQ ID NO: 13231 - RNA, 22 nt, synthetic construct
  source 1..22: mol_type = other RNA
tccctctgcgtgtaagtcggga

SEQ ID NO: 13232 - RNA, 22 nt, synthetic construct
  source 1..22: mol_type = other RNA
tccctgggaaaatggggtgttg

SEQ ID NO: 13233 - RNA, 22 nt, synthetic construct
  source 1..22: mol_type = other RNA
tcccttctccctccccctccgg

SEQ ID NO: 13234 - RNA, 22 nt, synthetic construct
  source 1..22: mol_type = other RNA
tcccttgaggagaggcctcttg

SEQ ID NO: 13235 - RNA, 22 nt, synthetic construct
  source 1..22: mol_type = other RNA
tccctttatgaattctctttcc

SEQ ID NO: 13236 - RNA, 22 nt, synthetic construct
  source 1..22: mol_type = other RNA
tccgacagaaaagagaccgaac

SEQ ID NO: 13237 - RNA, 22 nt, synthetic construct
  source 1..22: mol_type = other RNA
tccgccaacacagtagtgccgg

SEQ ID NO: 13238 - RNA, 22 nt, synthetic construct
  source 1..22: mol_type = other RNA
tccgcccaccgccccgcaccca

SEQ ID NO: 13239 - RNA, 22 nt, synthetic construct
  source 1..22: mol_type = other RNA
tccgccccgggttcccaccgcc

SEQ ID NO: 13240 - RNA, 22 nt, synthetic construct
  source 1..22: mol_type = other RNA
tccgcctttctgccccccaccc

SEQ ID NO: 13241 - RNA, 22 nt, synthetic construct
  source 1..22: mol_type = other RNA
tccgctcccctacctagccgag

SEQ ID NO: 13242 - RNA, 22 nt, synthetic construct
  source 1..22: mol_type = other RNA
tccgctcccttctccctccccc

SEQ ID NO: 13243 - RNA, 22 nt, synthetic construct
  source 1..22: mol_type = other RNA
tccgctcgaaatacacaggcat

SEQ ID NO: 13244 - RNA, 22 nt, synthetic construct
  source 1..22: mol_type = other RNA
tccgctcgggcagcgggctgag

SEQ ID NO: 13245 - RNA, 22 nt, synthetic construct
  source 1..22: mol_type = other RNA
tccgctgattggcggcgagtgg

SEQ ID NO: 13246 - RNA, 22 nt, synthetic construct
  source 1..22: mol_type = other RNA
tccggctagcctcttgtcgccg

SEQ ID NO: 13247 - RNA, 22 nt, synthetic construct
  source 1..22: mol_type = other RNA
tccggctcctcagagagcctcg

SEQ ID NO: 13248 - RNA, 22 nt, synthetic construct
  source 1..22: mol_type = other RNA
tccggttgccgcagggcgggcc

SEQ ID NO: 13249 - RNA, 22 nt, synthetic construct
  source 1..22: mol_type = other RNA
tccggtttcgagcattttccgc

SEQ ID NO: 13250 - RNA, 22 nt, synthetic construct
  source 1..22: mol_type = other RNA
tccgtaatcttcctggacgcct

SEQ ID NO: 13251 - RNA, 22 nt, synthetic construct
  source 1..22: mol_type = other RNA
tccgtccggtttcgagcatttt

SEQ ID NO: 13252 - RNA, 22 nt, synthetic construct
  source 1..22: mol_type = other RNA
tccgtctccccgcgctcgctct

SEQ ID NO: 13253 - RNA, 22 nt, synthetic construct
  source 1..22: mol_type = other RNA
tcctaagagcttggggagggcc

SEQ ID NO: 13254 - RNA, 22 nt, synthetic construct
  source 1..22: mol_type = other RNA
tcctacactcctcttcacattc

SEQ ID NO: 13255 - RNA, 22 nt, synthetic construct
  source 1..22: mol_type = other RNA
tcctcaagggaaaggtaaacgt

SEQ ID NO: 13256 - RNA, 22 nt, synthetic construct
  source 1..22: mol_type = other RNA
tcctcagagagcctcggctagg

SEQ ID NO: 13257 - RNA, 22 nt, synthetic construct
  source 1..22: mol_type = other RNA
tcctcccaccctccccttcctt

SEQ ID NO: 13258 - RNA, 22 nt, synthetic construct
  source 1..22: mol_type = other RNA
tcctcccccacccccacgagtg

SEQ ID NO: 13259 - RNA, 22 nt, synthetic construct
  source 1..22: mol_type = other RNA
tcctccccgaggccgagcgccg

SEQ ID NO: 13260 - RNA, 22 nt, synthetic construct
  source 1..22: mol_type = other RNA
tcctcccgccgtgtgtgaaaac

SEQ ID NO: 13261 - RNA, 22 nt, synthetic construct
  source 1..22: mol_type = other RNA
tcctccctctgcgagagcaatg

SEQ ID NO: 13262 - RNA, 22 nt, synthetic construct
  source 1..22: mol_type = other RNA
tcctccgtctccccgcgctcgc

SEQ ID NO: 13263 - RNA, 22 nt, synthetic construct
  source 1..22: mol_type = other RNA
tcctcctaagagcttggggagg

SEQ ID NO: 13264 - RNA, 22 nt, synthetic construct
  source 1..22: mol_type = other RNA
tcctcttcacattcccgactta

SEQ ID NO: 13265 - RNA, 22 nt, synthetic construct
  source 1..22: mol_type = other RNA
tcctgacccaggaaaaacatga

SEQ ID NO: 13266 - RNA, 22 nt, synthetic construct
  source 1..22: mol_type = other RNA
tcctgccacgttgcgcaggggc

SEQ ID NO: 13267 - RNA, 22 nt, synthetic construct
  source 1..22: mol_type = other RNA
tcctgccgcctcccgggagtgc

SEQ ID NO: 13268 - RNA, 22 nt, synthetic construct
  source 1..22: mol_type = other RNA
tcctgcggcgggaggggagggt

SEQ ID NO: 13269 - RNA, 22 nt, synthetic construct
  source 1..22: mol_type = other RNA
tcctggacgccttccctctcgt

SEQ ID NO: 13270 - RNA, 22 nt, synthetic construct
  source 1..22: mol_type = other RNA
tcctggccgggaatggcccgta

SEQ ID NO: 13271 - RNA, 22 nt, synthetic construct
  source 1..22: mol_type = other RNA
tcctgggaactgcctactccac

SEQ ID NO: 13272 - RNA, 22 nt, synthetic construct
  source 1..22: mol_type = other RNA
tcctgggtcaggacgcttcccc

SEQ ID NO: 13273 - RNA, 22 nt, synthetic construct
  source 1..22: mol_type = other RNA
tcctgtcagttacgccgtcggg

SEQ ID NO: 13274 - RNA, 22 nt, synthetic construct
  source 1..22: mol_type = other RNA
tccttcgggggagtcggtttac

SEQ ID NO: 13275 - RNA, 22 nt, synthetic construct
  source 1..22: mol_type = other RNA
tccttgcttgtctcacttcttg

SEQ ID NO: 13276 - RNA, 22 nt, synthetic construct
  source 1..22: mol_type = other RNA
tccttgggtcgtgggcctggcc

SEQ ID NO: 13277 - RNA, 22 nt, synthetic construct
  source 1..22: mol_type = other RNA
tcgaaaccggacggagccattg

SEQ ID NO: 13278 - RNA, 22 nt, synthetic construct
  source 1..22: mol_type = other RNA
tcgaaccctacacattcaacga

SEQ ID NO: 13279 - RNA, 22 nt, synthetic construct
  source 1..22: mol_type = other RNA
tcgaagacaagcaggcggcggg

SEQ ID NO: 13280 - RNA, 22 nt, synthetic construct
  source 1..22: mol_type = other RNA
tcgaagctgtgggaccgggccc

SEQ ID NO: 13281 - RNA, 22 nt, synthetic construct
  source 1..22: mol_type = other RNA
tcgacacctgattggctgtcga

SEQ ID NO: 13282 - RNA, 22 nt, synthetic construct
  source 1..22: mol_type = other RNA
tcgacagccaatcaggtgtcga

SEQ ID NO: 13283 - RNA, 22 nt, synthetic construct
  source 1..22: mol_type = other RNA
tcgagcattttccgctcccttc

SEQ ID NO: 13284 - RNA, 22 nt, synthetic construct
  source 1..22: mol_type = other RNA
tcgagccagtagcaagggcccg

SEQ ID NO: 13285 - RNA, 22 nt, synthetic construct
  source 1..22: mol_type = other RNA
tcgagcctggagttgagccaga

SEQ ID NO: 13286 - RNA, 22 nt, synthetic construct
  source 1..22: mol_type = other RNA
tcgagcggagggcagcaagagg

SEQ ID NO: 13287 - RNA, 22 nt, synthetic construct
  source 1..22: mol_type = other RNA
tcgagtcctgccgcctcccggg

SEQ ID NO: 13288 - RNA, 22 nt, synthetic construct
  source 1..22: mol_type = other RNA
tcgagtctcacatgagcgaaac

SEQ ID NO: 13289 - RNA, 22 nt, synthetic construct
  source 1..22: mol_type = other RNA
tcgagttaggcccaacgcggcg

SEQ ID NO: 13290 - RNA, 22 nt, synthetic construct
  source 1..22: mol_type = other RNA
tcgcagagggaggagcgcttcc

SEQ ID NO: 13291 - RNA, 22 nt, synthetic construct
  source 1..22: mol_type = other RNA
tcgcatgagagggaaagttaaa

SEQ ID NO: 13292 - RNA, 22 nt, synthetic construct
  source 1..22: mol_type = other RNA
tcgccacccccaccacacgttc

SEQ ID NO: 13293 - RNA, 22 nt, synthetic construct
  source 1..22: mol_type = other RNA
tcgcccttcaggcggtgggaac

SEQ ID NO: 13294 - RNA, 22 nt, synthetic construct
  source 1..22: mol_type = other RNA
tcgccgattggccgtttctcct

SEQ ID NO: 13295 - RNA, 22 nt, synthetic construct
  source 1..22: mol_type = other RNA
tcgccgccaatcagcggaagcc

SEQ ID NO: 13296 - RNA, 22 nt, synthetic construct
  source 1..22: mol_type = other RNA
tcgccgccttgcacacaccgtt

SEQ ID NO: 13297 - RNA, 22 nt, synthetic construct
  source 1..22: mol_type = other RNA
tcgcctagattagagggggatc

SEQ ID NO: 13298 - RNA, 22 nt, synthetic construct
  source 1..22: mol_type = other RNA
tcgcggcccccagagcgatcag

SEQ ID NO: 13299 - RNA, 22 nt, synthetic construct
  source 1..22: mol_type = other RNA
tcgcggccttgtgacagacaac

SEQ ID NO: 13300 - RNA, 22 nt, synthetic construct
  source 1..22: mol_type = other RNA
tcgcgttgccccctgggtgggg

SEQ ID NO: 13301 - RNA, 22 nt, synthetic construct
  source 1..22: mol_type = other RNA
tcgctaagcggctgcgtactcc

SEQ ID NO: 13302 - RNA, 22 nt, synthetic construct
  source 1..22: mol_type = other RNA
tcgctcatgtgagactcgagcc

SEQ ID NO: 13303 - RNA, 22 nt, synthetic construct
  source 1..22: mol_type = other RNA
tcgctccgcctttctgcccccc

SEQ ID NO: 13304 - RNA, 22 nt, synthetic construct
  source 1..22: mol_type = other RNA
tcgctctccttgggtcgtgggc

SEQ ID NO: 13305 - RNA, 22 nt, synthetic construct
  source 1..22: mol_type = other RNA
tcgctctgggggccgcgatctc

SEQ ID NO: 13306 - RNA, 22 nt, synthetic construct
  source 1..22: mol_type = other RNA
tcggacccttaccttgtcccag

SEQ ID NO: 13307 - RNA, 22 nt, synthetic construct
  source 1..22: mol_type = other RNA
tcggcctcggggaggaccgtac

SEQ ID NO: 13308 - RNA, 22 nt, synthetic construct
  source 1..22: mol_type = other RNA
tcggcgacaagaggctagccgg

SEQ ID NO: 13309 - RNA, 22 nt, synthetic construct
  source 1..22: mol_type = other RNA
tcggcgctccggctcctcagag

SEQ ID NO: 13310 - RNA, 22 nt, synthetic construct
  source 1..22: mol_type = other RNA
tcggctaggtaggggagcggaa

SEQ ID NO: 13311 - RNA, 22 nt, synthetic construct
  source 1..22: mol_type = other RNA
tcggctctggcgcgggcgtcct

SEQ ID NO: 13312 - RNA, 22 nt, synthetic construct
  source 1..22: mol_type = other RNA
tcgggaacataatgtttgttac

SEQ ID NO: 13313 - RNA, 22 nt, synthetic construct
  source 1..22: mol_type = other RNA
tcgggaatgtgaagaggagtgt

SEQ ID NO: 13314 - RNA, 22 nt, synthetic construct
  source 1..22: mol_type = other RNA
tcgggagtacgcagccgcttag

SEQ ID NO: 13315 - RNA, 22 nt, synthetic construct
  source 1..22: mol_type = other RNA
tcgggcagcgggctgagtgagc

SEQ ID NO: 13316 - RNA, 22 nt, synthetic construct
  source 1..22: mol_type = other RNA
tcgggccccaggggagggaagg

SEQ ID NO: 13317 - RNA, 22 nt, synthetic construct
  source 1..22: mol_type = other RNA
tcgggcttgtctcgcccttcag

SEQ ID NO: 13318 - RNA, 22 nt, synthetic construct
  source 1..22: mol_type = other RNA
tcggggaggaccgtaccaacgc

SEQ ID NO: 13319 - RNA, 22 nt, synthetic construct
  source 1..22: mol_type = other RNA
tcgggggagtcggtttacccgc

SEQ ID NO: 13320 - RNA, 22 nt, synthetic construct
  source 1..22: mol_type = other RNA
tcggtctcttttctgtcggacc

SEQ ID NO: 13321 - RNA, 22 nt, synthetic construct
  source 1..22: mol_type = other RNA
tcggtttacccgccgcctgctt

SEQ ID NO: 13322 - RNA, 22 nt, synthetic construct
  source 1..22: mol_type = other RNA
tcgtgaggttcggtctcttttc

SEQ ID NO: 13323 - RNA, 22 nt, synthetic construct
  source 1..22: mol_type = other RNA
tcgtgggcctggccctccccaa

SEQ ID NO: 13324 - RNA, 22 nt, synthetic construct
  source 1..22: mol_type = other RNA
tcgtgggggtgggggaggagcg

SEQ ID NO: 13325 - RNA, 22 nt, synthetic construct
  source 1..22: mol_type = other RNA
tcgttctccacgcccaaggcaa

SEQ ID NO: 13326 - RNA, 22 nt, synthetic construct
  source 1..22: mol_type = other RNA
tcgttgaatgtgtagggttcga

SEQ ID NO: 13327 - RNA, 22 nt, synthetic construct
  source 1..22: mol_type = other RNA
tcgttttacttgccttgggcgt

SEQ ID NO: 13328 - RNA, 22 nt, synthetic construct
  source 1..22: mol_type = other RNA
tcgttttctggcttcccacctc

SEQ ID NO: 13329 - RNA, 22 nt, synthetic construct
  source 1..22: mol_type = other RNA
tctaatctaggcgacccaactc

SEQ ID NO: 13330 - RNA, 22 nt, synthetic construct
  source 1..22: mol_type = other RNA
tctacaccccacctacctaccc

SEQ ID NO: 13331 - RNA, 22 nt, synthetic construct
  source 1..22: mol_type = other RNA
tctaggcgacccaactccccct

SEQ ID NO: 13332 - RNA, 22 nt, synthetic construct
  source 1..22: mol_type = other RNA
tctaggcggccccggcggcttc

SEQ ID NO: 13333 - RNA, 22 nt, synthetic construct
  source 1..22: mol_type = other RNA
tctatagaatcaattagcatag

SEQ ID NO: 13334 - RNA, 22 nt, synthetic construct
  source 1..22: mol_type = other RNA
tctatagagtccttgcttgtct

SEQ ID NO: 13335 - RNA, 22 nt, synthetic construct
  source 1..22: mol_type = other RNA
tctatgctaattgattctatag

SEQ ID NO: 13336 - RNA, 22 nt, synthetic construct
  source 1..22: mol_type = other RNA
tctcacaagatcgttctccacg

SEQ ID NO: 13337 - RNA, 22 nt, synthetic construct
  source 1..22: mol_type = other RNA
tctcacatgagcgaaaccactg

SEQ ID NO: 13338 - RNA, 22 nt, synthetic construct
  source 1..22: mol_type = other RNA
tctcacccccctcgccgccttg

SEQ ID NO: 13339 - RNA, 22 nt, synthetic construct
  source 1..22: mol_type = other RNA
tctcacttcttgggcgtcagtg

SEQ ID NO: 13340 - RNA, 22 nt, synthetic construct
  source 1..22: mol_type = other RNA
tctcagacacgctgtggcacac

SEQ ID NO: 13341 - RNA, 22 nt, synthetic construct
  source 1..22: mol_type = other RNA
tctcatgcgatttacctacttg

SEQ ID NO: 13342 - RNA, 22 nt, synthetic construct
  source 1..22: mol_type = other RNA
tctccacgcccaaggcaagtaa

SEQ ID NO: 13343 - RNA, 22 nt, synthetic construct
  source 1..22: mol_type = other RNA
tctccccgatcccccactccct

SEQ ID NO: 13344 - RNA, 22 nt, synthetic construct
  source 1..22: mol_type = other RNA
tctccccgcgctcgctctcctt

SEQ ID NO: 13345 - RNA, 22 nt, synthetic construct
  source 1..22: mol_type = other RNA
tctcccctccgtaatcttcctg

SEQ ID NO: 13346 - RNA, 22 nt, synthetic construct
  source 1..22: mol_type = other RNA
tctccctccccctccggttgcc

SEQ ID NO: 13347 - RNA, 22 nt, synthetic construct
  source 1..22: mol_type = other RNA
tctccctgggaaaatggggtgt

SEQ ID NO: 13348 - RNA, 22 nt, synthetic construct
  source 1..22: mol_type = other RNA
tctccgcccaccgccccgcacc

SEQ ID NO: 13349 - RNA, 22 nt, synthetic construct
  source 1..22: mol_type = other RNA
tctcctcaagggaaaggtaaac

SEQ ID NO: 13350 - RNA, 22 nt, synthetic construct
  source 1..22: mol_type = other RNA
tctcctcccgccgtgtgtgaaa

SEQ ID NO: 13351 - RNA, 22 nt, synthetic construct
  source 1..22: mol_type = other RNA
tctccttgggtcgtgggcctgg

SEQ ID NO: 13352 - RNA, 22 nt, synthetic construct
  source 1..22: mol_type = other RNA
tctcgcagagggaggagcgctt

SEQ ID NO: 13353 - RNA, 22 nt, synthetic construct
  source 1..22: mol_type = other RNA
tctcgcccttcaggcggtggga

SEQ ID NO: 13354 - RNA, 22 nt, synthetic construct
  source 1..22: mol_type = other RNA
tctcgcggccttgtgacagaca

SEQ ID NO: 13355 - RNA, 22 nt, synthetic construct
  source 1..22: mol_type = other RNA
tctcgcgttgccccctgggtgg

SEQ ID NO: 13356 - RNA, 22 nt, synthetic construct
  source 1..22: mol_type = other RNA
tctcgttttctggcttcccacc

SEQ ID NO: 13357 - RNA, 22 nt, synthetic construct
  source 1..22: mol_type = other RNA
tctctacaccccacctacctac

SEQ ID NO: 13358 - RNA, 22 nt, synthetic construct
  source 1..22: mol_type = other RNA
tctctaggcggccccggcggct

SEQ ID NO: 13359 - RNA, 22 nt, synthetic construct
  source 1..22: mol_type = other RNA
tctctccccgatcccccactcc

SEQ ID NO: 13360 - RNA, 22 nt, synthetic construct
  source 1..22: mol_type = other RNA
tctctccctgggaaaatggggt

SEQ ID NO: 13361 - RNA, 22 nt, synthetic construct
  source 1..22: mol_type = other RNA
tctctctccctgggaaaatggg

SEQ ID NO: 13362 - RNA, 22 nt, synthetic construct
  source 1..22: mol_type = other RNA
tctctgaggagccggagcgccg

SEQ ID NO: 13363 - RNA, 22 nt, synthetic construct
  source 1..22: mol_type = other RNA
tctctggctccccgtggcgtgt

SEQ ID NO: 13364 - RNA, 22 nt, synthetic construct
  source 1..22: mol_type = other RNA
tctctttccctctgcgtgtaag

SEQ ID NO: 13365 - RNA, 22 nt, synthetic construct
  source 1..22: mol_type = other RNA
tctcttttctgtcggaccctta

SEQ ID NO: 13366 - RNA, 22 nt, synthetic construct
  source 1..22: mol_type = other RNA
tctgagatagcctcgttgaatg

SEQ ID NO: 13367 - RNA, 22 nt, synthetic construct
  source 1..22: mol_type = other RNA
tctgaggagccggagcgccgaa

SEQ ID NO: 13368 - RNA, 22 nt, synthetic construct
  source 1..22: mol_type = other RNA
tctgaggtgggaagccagaaaa

SEQ ID NO: 13369 - RNA, 22 nt, synthetic construct
  source 1..22: mol_type = other RNA
tctgatcgctctgggggccgcg

SEQ ID NO: 13370 - RNA, 22 nt, synthetic construct
  source 1..22: mol_type = other RNA
tctgccccccacccccacctca

SEQ ID NO: 13371 - RNA, 22 nt, synthetic construct
  source 1..22: mol_type = other RNA
tctgcctttgaagatattctca

SEQ ID NO: 13372 - RNA, 22 nt, synthetic construct
  source 1..22: mol_type = other RNA
tctgcgagagcaatggctccgt

SEQ ID NO: 13373 - RNA, 22 nt, synthetic construct
  source 1..22: mol_type = other RNA
tctgcgtgtaagtcgggaatgt

SEQ ID NO: 13374 - RNA, 22 nt, synthetic construct
  source 1..22: mol_type = other RNA
tctggccccgcgcccctgcgca

SEQ ID NO: 13375 - RNA, 22 nt, synthetic construct
  source 1..22: mol_type = other RNA
tctggcgcgggcgtcctcccac

SEQ ID NO: 13376 - RNA, 22 nt, synthetic construct
  source 1..22: mol_type = other RNA
tctggctcaactccaggctcga

SEQ ID NO: 13377 - RNA, 22 nt, synthetic construct
  source 1..22: mol_type = other RNA
tctggctccccgtggcgtgtgc

SEQ ID NO: 13378 - RNA, 22 nt, synthetic construct
  source 1..22: mol_type = other RNA
tctggcttcccacctcagatgg

SEQ ID NO: 13379 - RNA, 22 nt, synthetic construct
  source 1..22: mol_type = other RNA
tctgggggccgcgatctcccct

SEQ ID NO: 13380 - RNA, 22 nt, synthetic construct
  source 1..22: mol_type = other RNA
tctggtggcttgcgggggttgc

SEQ ID NO: 13381 - RNA, 22 nt, synthetic construct
  source 1..22: mol_type = other RNA
tctggtgggaggggaggtgcgg

SEQ ID NO: 13382 - RNA, 22 nt, synthetic construct
  source 1..22: mol_type = other RNA
tctggttggagtaaagctcctg

SEQ ID NO: 13383 - RNA, 22 nt, synthetic construct
  source 1..22: mol_type = other RNA
tctgtcacaaggccgcgagaac

SEQ ID NO: 13384 - RNA, 22 nt, synthetic construct
  source 1..22: mol_type = other RNA
tctgtcggacccttaccttgtc

SEQ ID NO: 13385 - RNA, 22 nt, synthetic construct
  source 1..22: mol_type = other RNA
tcttaggaggatgctgccactt

SEQ ID NO: 13386 - RNA, 22 nt, synthetic construct
  source 1..22: mol_type = other RNA
tcttcaaaggcagaaaaatatt

SEQ ID NO: 13387 - RNA, 22 nt, synthetic construct
  source 1..22: mol_type = other RNA
tcttcacattcccgacttacac

SEQ ID NO: 13388 - RNA, 22 nt, synthetic construct
  source 1..22: mol_type = other RNA
tcttcaccccctttcctgggaa

SEQ ID NO: 13389 - RNA, 22 nt, synthetic construct
  source 1..22: mol_type = other RNA
tcttcctggacgccttccctct

SEQ ID NO: 13390 - RNA, 22 nt, synthetic construct
  source 1..22: mol_type = other RNA
tcttcgacacctgattggctgt

SEQ ID NO: 13391 - RNA, 22 nt, synthetic construct
  source 1..22: mol_type = other RNA
tcttctctaggcggccccggcg

SEQ ID NO: 13392 - RNA, 22 nt, synthetic construct
  source 1..22: mol_type = other RNA
tcttgctgccctccgctcgaaa

SEQ ID NO: 13393 - RNA, 22 nt, synthetic construct
  source 1..22: mol_type = other RNA
tcttgggcgtcagtggtctttc

SEQ ID NO: 13394 - RNA, 22 nt, synthetic construct
  source 1..22: mol_type = other RNA
tcttgtcgccgattggccgttt

SEQ ID NO: 13395 - RNA, 22 nt, synthetic construct
  source 1..22: mol_type = other RNA
tcttgtgagaatatcttcaaag

SEQ ID NO: 13396 - RNA, 22 nt, synthetic construct
  source 1..22: mol_type = other RNA
tctttccctctgcgtgtaagtc

SEQ ID NO: 13397 - RNA, 22 nt, synthetic construct
  source 1..22: mol_type = other RNA
tctttcctacactcctcttcac

SEQ ID NO: 13398 - RNA, 22 nt, synthetic construct
  source 1..22: mol_type = other RNA
tctttctcttggatatggatgc

SEQ ID NO: 13399 - RNA, 22 nt, synthetic construct
  source 1..22: mol_type = other RNA
tcttttctgtcggacccttacc

SEQ ID NO: 13400 - RNA, 22 nt, synthetic construct
  source 1..22: mol_type = other RNA
tgaaaacacaaatggcgtattc

SEQ ID NO: 13401 - RNA, 22 nt, synthetic construct
  source 1..22: mol_type = other RNA
tgaaagggggagttgggtcgcc

SEQ ID NO: 13402 - RNA, 22 nt, synthetic construct
  source 1..22: mol_type = other RNA
tgaaatcggctctggcgcgggc

SEQ ID NO: 13403 - RNA, 22 nt, synthetic construct
  source 1..22: mol_type = other RNA
tgaaccagggctctttcctaca

SEQ ID NO: 13404 - RNA, 22 nt, synthetic construct
  source 1..22: mol_type = other RNA
tgaagaggagtgtaggaaagag

SEQ ID NO: 13405 - RNA, 22 nt, synthetic construct
  source 1..22: mol_type = other RNA
tgaagaggcgttgggggagggg

SEQ ID NO: 13406 - RNA, 22 nt, synthetic construct
  source 1..22: mol_type = other RNA
tgaagatattctcacaagatcg

SEQ ID NO: 13407 - RNA, 22 nt, synthetic construct
  source 1..22: mol_type = other RNA
tgaagggcgagacaagcccgac

SEQ ID NO: 13408 - RNA, 22 nt, synthetic construct
  source 1..22: mol_type = other RNA
tgaatgtgtagggttcgagcct

SEQ ID NO: 13409 - RNA, 22 nt, synthetic construct
  source 1..22: mol_type = other RNA
tgaattctctttccctctgcgt

SEQ ID NO: 13410 - RNA, 22 nt, synthetic construct
  source 1..22: mol_type = other RNA
tgacagacaactctgatcgctc

SEQ ID NO: 13411 - RNA, 22 nt, synthetic construct
  source 1..22: mol_type = other RNA
tgacaggagctttactccaacc

SEQ ID NO: 13412 - RNA, 22 nt, synthetic construct
  source 1..22: mol_type = other RNA
tgacccaggaaaaacatgaaag

SEQ ID NO: 13413 - RNA, 22 nt, synthetic construct
  source 1..22: mol_type = other RNA
tgaccctcccctcccgccgcag

SEQ ID NO: 13414 - RNA, 22 nt, synthetic construct
  source 1..22: mol_type = other RNA
tgacccttccctcccctggggc

SEQ ID NO: 13415 - RNA, 22 nt, synthetic construct
  source 1..22: mol_type = other RNA
tgaccgcacggggattcccagc

SEQ ID NO: 13416 - RNA, 22 nt, synthetic construct
  source 1..22: mol_type = other RNA
tgacgcccaagaagtgagacaa

SEQ ID NO: 13417 - RNA, 22 nt, synthetic construct
  source 1..22: mol_type = other RNA
tgactgcagcatccatatccaa

SEQ ID NO: 13418 - RNA, 22 nt, synthetic construct
  source 1..22: mol_type = other RNA
tgagaagtggcagcatcctcct

SEQ ID NO: 13419 - RNA, 22 nt, synthetic construct
  source 1..22: mol_type = other RNA
tgagaatatcttcaaaggcaga

SEQ ID NO: 13420 - RNA, 22 nt, synthetic construct
  source 1..22: mol_type = other RNA
tgagacaagcaaggactctata

SEQ ID NO: 13421 - RNA, 22 nt, synthetic construct
  source 1..22: mol_type = other RNA
tgagactcgagccagtagcaag

SEQ ID NO: 13422 - RNA, 22 nt, synthetic construct
  source 1..22: mol_type = other RNA
tgagagggaaagttaaactgtt

SEQ ID NO: 13423 - RNA, 22 nt, synthetic construct
  source 1..22: mol_type = other RNA
tgagatagcctcgttgaatgtg

SEQ ID NO: 13424 - RNA, 22 nt, synthetic construct
  source 1..22: mol_type = other RNA
tgagccagattgtgtcgtttta

SEQ ID NO: 13425 - RNA, 22 nt, synthetic construct
  source 1..22: mol_type = other RNA
tgagcgaaaccactgcgcgggg

SEQ ID NO: 13426 - RNA, 22 nt, synthetic construct
  source 1..22: mol_type = other RNA
tgaggagaggcctcttgctgcc

SEQ ID NO: 13427 - RNA, 22 nt, synthetic construct
  source 1..22: mol_type = other RNA
tgaggagccggagcgccgaagc

SEQ ID NO: 13428 - RNA, 22 nt, synthetic construct
  source 1..22: mol_type = other RNA
tgaggtgggaagccagaaaacg

SEQ ID NO: 13429 - RNA, 22 nt, synthetic construct
  source 1..22: mol_type = other RNA
tgaggtgggggtggggggcaga

SEQ ID NO: 13430 - RNA, 22 nt, synthetic construct
  source 1..22: mol_type = other RNA
tgaggttcggtctcttttctgt

SEQ ID NO: 13431 - RNA, 22 nt, synthetic construct
  source 1..22: mol_type = other RNA
tgagtctctgagcgcaggcggg

SEQ ID NO: 13432 - RNA, 22 nt, synthetic construct
  source 1..22: mol_type = other RNA
tgatcgctctgggggccgcgat

SEQ ID NO: 13433 - RNA, 22 nt, synthetic construct
  source 1..22: mol_type = other RNA
tgattctatagagtccttgctt

SEQ ID NO: 13434 - RNA, 22 nt, synthetic construct
  source 1..22: mol_type = other RNA
tgattggcggcgagtgggccaa

SEQ ID NO: 13435 - RNA, 22 nt, synthetic construct
  source 1..22: mol_type = other RNA
tgattggctgtcgaagctgtgg

SEQ ID NO: 13436 - RNA, 22 nt, synthetic construct
  source 1..22: mol_type = other RNA
tgcaacaccccattttcccagg

SEQ ID NO: 13437 - RNA, 22 nt, synthetic construct
  source 1..22: mol_type = other RNA
tgcaacggtgtgtgcaaggcgg

SEQ ID NO: 13438 - RNA, 22 nt, synthetic construct
  source 1..22: mol_type = other RNA
tgcaaggcggcgaggggggtga

SEQ ID NO: 13439 - RNA, 22 nt, synthetic construct
  source 1..22: mol_type = other RNA
tgcacacaccgttgcaacaccc

SEQ ID NO: 13440 - RNA, 22 nt, synthetic construct
  source 1..22: mol_type = other RNA
tgcagcatccatatccaagaga

SEQ ID NO: 13441 - RNA, 22 nt, synthetic construct
  source 1..22: mol_type = other RNA
tgcatccagccacccctttccc

SEQ ID NO: 13442 - RNA, 22 nt, synthetic construct
  source 1..22: mol_type = other RNA
tgccacagcgtgtctgagatag

SEQ ID NO: 13443 - RNA, 22 nt, synthetic construct
  source 1..22: mol_type = other RNA
tgccacgttgcgcaggggcgcg

SEQ ID NO: 13444 - RNA, 22 nt, synthetic construct
  source 1..22: mol_type = other RNA
tgccacttctcacccccctcgc

SEQ ID NO: 13445 - RNA, 22 nt, synthetic construct
  source 1..22: mol_type = other RNA
tgccccccacccccacctcacg

SEQ ID NO: 13446 - RNA, 22 nt, synthetic construct
  source 1..22: mol_type = other RNA
tgccccctgggtggggcgggta

SEQ ID NO: 13447 - RNA, 22 nt, synthetic construct
  source 1..22: mol_type = other RNA
tgcccctggcgccggcgctggg

SEQ ID NO: 13448 - RNA, 22 nt, synthetic construct
  source 1..22: mol_type = other RNA
tgcccgagcggaaacgccactg

SEQ ID NO: 13449 - RNA, 22 nt, synthetic construct
  source 1..22: mol_type = other RNA
tgccctccgctcgaaatacaca

SEQ ID NO: 13450 - RNA, 22 nt, synthetic construct
  source 1..22: mol_type = other RNA
tgccgcctcccgggagtgccgt

SEQ ID NO: 13451 - RNA, 22 nt, synthetic construct
  source 1..22: mol_type = other RNA
tgccggcccccctctttccctg

SEQ ID NO: 13452 - RNA, 22 nt, synthetic construct
  source 1..22: mol_type = other RNA
tgccggccgagacttctggatg

SEQ ID NO: 13453 - RNA, 22 nt, synthetic construct
  source 1..22: mol_type = other RNA
tgcctactccacgtttaccttt

SEQ ID NO: 13454 - RNA, 22 nt, synthetic construct
  source 1..22: mol_type = other RNA
tgcctgtagcaggtcgggcttg

SEQ ID NO: 13455 - RNA, 22 nt, synthetic construct
  source 1..22: mol_type = other RNA
tgcctgtgtatttcgagcggag

SEQ ID NO: 13456 - RNA, 22 nt, synthetic construct
  source 1..22: mol_type = other RNA
tgccttgggcgtggagaacgat

SEQ ID NO: 13457 - RNA, 22 nt, synthetic construct
  source 1..22: mol_type = other RNA
tgcctttcccgtgggaagtcgg

SEQ ID NO: 13458 - RNA, 22 nt, synthetic construct
  source 1..22: mol_type = other RNA
tgcctttgaagatattctcaca

SEQ ID NO: 13459 - RNA, 22 nt, synthetic construct
  source 1..22: mol_type = other RNA
tgcctttgggaagcagccatct

SEQ ID NO: 13460 - RNA, 22 nt, synthetic construct
  source 1..22: mol_type = other RNA
tgcgagagcaatggctccgtcc

SEQ ID NO: 13461 - RNA, 22 nt, synthetic construct
  source 1..22: mol_type = other RNA
tgcgatttacctacttgaacca

SEQ ID NO: 13462 - RNA, 22 nt, synthetic construct
  source 1..22: mol_type = other RNA
tgcgcaacgtggcaggaagcgc

SEQ ID NO: 13463 - RNA, 22 nt, synthetic construct
  source 1..22: mol_type = other RNA
tgcgcaggggcgcggggccaga

SEQ ID NO: 13464 - RNA, 22 nt, synthetic construct
  source 1..22: mol_type = other RNA
tgcgctcagagactcacgcagc

SEQ ID NO: 13465 - RNA, 22 nt, synthetic construct
  source 1..22: mol_type = other RNA
tgcggcaaccggagggggaggg

SEQ ID NO: 13466 - RNA, 22 nt, synthetic construct
  source 1..22: mol_type = other RNA
tgcggcgcacggcactcccggg

SEQ ID NO: 13467 - RNA, 22 nt, synthetic construct
  source 1..22: mol_type = other RNA
tgcggcgctcggcctcggggag

SEQ ID NO: 13468 - RNA, 22 nt, synthetic construct
  source 1..22: mol_type = other RNA
tgcggcgggaggggagggtcag

SEQ ID NO: 13469 - RNA, 22 nt, synthetic construct
  source 1..22: mol_type = other RNA
tgcggggcggtgggcggagagg

SEQ ID NO: 13470 - RNA, 22 nt, synthetic construct
  source 1..22: mol_type = other RNA
tgcgggggttgcctttcccgtg

SEQ ID NO: 13471 - RNA, 22 nt, synthetic construct
  source 1..22: mol_type = other RNA
tgcggtacactggggggatggg

SEQ ID NO: 13472 - RNA, 22 nt, synthetic construct
  source 1..22: mol_type = other RNA
tgcggtcagtggcgtttccgct

SEQ ID NO: 13473 - RNA, 22 nt, synthetic construct
  source 1..22: mol_type = other RNA
tgcgtactcccgacggcgtaac

SEQ ID NO: 13474 - RNA, 22 nt, synthetic construct
  source 1..22: mol_type = other RNA
tgcgtgagtctctgagcgcagg

SEQ ID NO: 13475 - RNA, 22 nt, synthetic construct
  source 1..22: mol_type = other RNA
tgcgtgtaagtcgggaatgtga

SEQ ID NO: 13476 - RNA, 22 nt, synthetic construct
  source 1..22: mol_type = other RNA
tgctaattgattctatagagtc

SEQ ID NO: 13477 - RNA, 22 nt, synthetic construct
  source 1..22: mol_type = other RNA
tgctacaggcactcgtgggggt

SEQ ID NO: 13478 - RNA, 22 nt, synthetic construct
  source 1..22: mol_type = other RNA
tgctactggctcgagtctcaca

SEQ ID NO: 13479 - RNA, 22 nt, synthetic construct
  source 1..22: mol_type = other RNA
tgctcgaaaccggacggagcca

SEQ ID NO: 13480 - RNA, 22 nt, synthetic construct
  source 1..22: mol_type = other RNA
tgctctcgcagagggaggagcg

SEQ ID NO: 13481 - RNA, 22 nt, synthetic construct
  source 1..22: mol_type = other RNA
tgctgccacttctcacccccct

SEQ ID NO: 13482 - RNA, 22 nt, synthetic construct
  source 1..22: mol_type = other RNA
tgctgccctccgctcgaaatac

SEQ ID NO: 13483 - RNA, 22 nt, synthetic construct
  source 1..22: mol_type = other RNA
tgctgggtgtgcgggcgcggcc

SEQ ID NO: 13484 - RNA, 22 nt, synthetic construct
  source 1..22: mol_type = other RNA
tgcttcccaaaggcattacctt

SEQ ID NO: 13485 - RNA, 22 nt, synthetic construct
  source 1..22: mol_type = other RNA
tgcttcggcgctccggctcctc

SEQ ID NO: 13486 - RNA, 22 nt, synthetic construct
  source 1..22: mol_type = other RNA
tgcttgtctcacttcttgggcg

SEQ ID NO: 13487 - RNA, 22 nt, synthetic construct
  source 1..22: mol_type = other RNA
tgcttgtcttcgacacctgatt

SEQ ID NO: 13488 - RNA, 22 nt, synthetic construct
  source 1..22: mol_type = other RNA
tggacgccttccctctcgtttt

SEQ ID NO: 13489 - RNA, 22 nt, synthetic construct
  source 1..22: mol_type = other RNA
tggagaacgatcttgtgagaat

SEQ ID NO: 13490 - RNA, 22 nt, synthetic construct
  source 1..22: mol_type = other RNA
tggagtaaagctcctgtcagtt

SEQ ID NO: 13491 - RNA, 22 nt, synthetic construct
  source 1..22: mol_type = other RNA
tggagtaggcagttcccaggaa

SEQ ID NO: 13492 - RNA, 22 nt, synthetic construct
  source 1..22: mol_type = other RNA
tggagttgagccagattgtgtc

SEQ ID NO: 13493 - RNA, 22 nt, synthetic construct
  source 1..22: mol_type = other RNA
tggatgcaggcgggagggaggc

SEQ ID NO: 13494 - RNA, 22 nt, synthetic construct
  source 1..22: mol_type = other RNA
tggcacacgccacggggagcca

SEQ ID NO: 13495 - RNA, 22 nt, synthetic construct
  source 1..22: mol_type = other RNA
tggcagcatcctcctaagagct

SEQ ID NO: 13496 - RNA, 22 nt, synthetic construct
  source 1..22: mol_type = other RNA
tggcaggaagcgcgcgctggag

SEQ ID NO: 13497 - RNA, 22 nt, synthetic construct
  source 1..22: mol_type = other RNA
tggcccactcgccgccaatcag

SEQ ID NO: 13498 - RNA, 22 nt, synthetic construct
  source 1..22: mol_type = other RNA
tggccccgcgcccctgcgcaac

SEQ ID NO: 13499 - RNA, 22 nt, synthetic construct
  source 1..22: mol_type = other RNA
tggcccgtacccgtgaggtggg

SEQ ID NO: 13500 - RNA, 22 nt, synthetic construct
  source 1..22: mol_type = other RNA
tggccctccccaagctcttagg

SEQ ID NO: 13501 - RNA, 22 nt, synthetic construct
  source 1..22: mol_type = other RNA
tggccgggaatggcccgtaccc

SEQ ID NO: 13502 - RNA, 22 nt, synthetic construct
  source 1..22: mol_type = other RNA
tggccgtttctcctcccgccgt

SEQ ID NO: 13503 - RNA, 22 nt, synthetic construct
  source 1..22: mol_type = other RNA
tggcctctccgcccaccgcccc

SEQ ID NO: 13504 - RNA, 22 nt, synthetic construct
  source 1..22: mol_type = other RNA
tggcgaaggtaatgcctttggg

SEQ ID NO: 13505 - RNA, 22 nt, synthetic construct
  source 1..22: mol_type = other RNA
tggcgccgcgttgggcctaact

SEQ ID NO: 13506 - RNA, 22 nt, synthetic construct
  source 1..22: mol_type = other RNA
tggcgccggcgctgggaatccc

SEQ ID NO: 13507 - RNA, 22 nt, synthetic construct
  source 1..22: mol_type = other RNA
tggcgcgggcgtcctcccaccc

SEQ ID NO: 13508 - RNA, 22 nt, synthetic construct
  source 1..22: mol_type = other RNA
tggcggactggcgggactgggg

SEQ ID NO: 13509 - RNA, 22 nt, synthetic construct
  source 1..22: mol_type = other RNA
tggcggcgagtgggccaatggg

SEQ ID NO: 13510 - RNA, 22 nt, synthetic construct
  source 1..22: mol_type = other RNA
tggcgggactggggctgcgtga

SEQ ID NO: 13511 - RNA, 22 nt, synthetic construct
  source 1..22: mol_type = other RNA
tggcggggaggcgggcgttggt

SEQ ID NO: 13512 - RNA, 22 nt, synthetic construct
  source 1..22: mol_type = other RNA
tggcgtattctggttggagtaa

SEQ ID NO: 13513 - RNA, 22 nt, synthetic construct
  source 1..22: mol_type = other RNA
tggcgtgtgccacagcgtgtct

SEQ ID NO: 13514 - RNA, 22 nt, synthetic construct
  source 1..22: mol_type = other RNA
tggcgtttccgctcgggcagcg

SEQ ID NO: 13515 - RNA, 22 nt, synthetic construct
  source 1..22: mol_type = other RNA
tggctaggggggccgtctggtg

SEQ ID NO: 13516 - RNA, 22 nt, synthetic construct
  source 1..22: mol_type = other RNA
tggctcaactccaggctcgaac

SEQ ID NO: 13517 - RNA, 22 nt, synthetic construct
  source 1..22: mol_type = other RNA
tggctccccgtggcgtgtgcca

SEQ ID NO: 13518 - RNA, 22 nt, synthetic construct
  source 1..22: mol_type = other RNA
tggctccgtccggtttcgagca

SEQ ID NO: 13519 - RNA, 22 nt, synthetic construct
  source 1..22: mol_type = other RNA
tggctcgagtctcacatgagcg

SEQ ID NO: 13520 - RNA, 22 nt, synthetic construct
  source 1..22: mol_type = other RNA
tggctcgctccgcctttctgcc

SEQ ID NO: 13521 - RNA, 22 nt, synthetic construct
  source 1..22: mol_type = other RNA
tggctgcttcccaaaggcatta

SEQ ID NO: 13522 - RNA, 22 nt, synthetic construct
  source 1..22: mol_type = other RNA
tggctggatgcaggcgggaggg

SEQ ID NO: 13523 - RNA, 22 nt, synthetic construct
  source 1..22: mol_type = other RNA
tggctgtcgaagctgtgggacc

SEQ ID NO: 13524 - RNA, 22 nt, synthetic construct
  source 1..22: mol_type = other RNA
tggcttcccacctcagatggct

SEQ ID NO: 13525 - RNA, 22 nt, synthetic construct
  source 1..22: mol_type = other RNA
tggcttgcgggggttgcctttc

SEQ ID NO: 13526 - RNA, 22 nt, synthetic construct
  source 1..22: mol_type = other RNA
tgggaaaatggggtgttgcaac

SEQ ID NO: 13527 - RNA, 22 nt, synthetic construct
  source 1..22: mol_type = other RNA
tgggaaagccccttctatgcta

SEQ ID NO: 13528 - RNA, 22 nt, synthetic construct
  source 1..22: mol_type = other RNA
tgggaactgcctactccacgtt

SEQ ID NO: 13529 - RNA, 22 nt, synthetic construct
  source 1..22: mol_type = other RNA
tgggaagcagccatctgaggtg

SEQ ID NO: 13530 - RNA, 22 nt, synthetic construct
  source 1..22: mol_type = other RNA
tgggaagccagaaaacgagagg

SEQ ID NO: 13531 - RNA, 22 nt, synthetic construct
  source 1..22: mol_type = other RNA
tgggaagtcgggaacataatgt

SEQ ID NO: 13532 - RNA, 22 nt, synthetic construct
  source 1..22: mol_type = other RNA
tgggaatccccgtgcggtcagt

SEQ ID NO: 13533 - RNA, 22 nt, synthetic construct
  source 1..22: mol_type = other RNA
tgggacaaggtaagggtccgac

SEQ ID NO: 13534 - RNA, 22 nt, synthetic construct
  source 1..22: mol_type = other RNA
tgggaccgggcccttgctactg

SEQ ID NO: 13535 - RNA, 22 nt, synthetic construct
  source 1..22: mol_type = other RNA
tgggaggacgcccgcgccagag

SEQ ID NO: 13536 - RNA, 22 nt, synthetic construct
  source 1..22: mol_type = other RNA
tgggagggaaaggggtggctgg

SEQ ID NO: 13537 - RNA, 22 nt, synthetic construct
  source 1..22: mol_type = other RNA
tgggaggggaggtgcggtacac

SEQ ID NO: 13538 - RNA, 22 nt, synthetic construct
  source 1..22: mol_type = other RNA
tgggccaatgggtgcggggcgg

SEQ ID NO: 13539 - RNA, 22 nt, synthetic construct
  source 1..22: mol_type = other RNA
tgggcctaactcgagtcctgcc

SEQ ID NO: 13540 - RNA, 22 nt, synthetic construct
  source 1..22: mol_type = other RNA
tgggcctggccctccccaagct

SEQ ID NO: 13541 - RNA, 22 nt, synthetic construct
  source 1..22: mol_type = other RNA
tgggcggagaggccaatggcgc

SEQ ID NO: 13542 - RNA, 22 nt, synthetic construct
  source 1..22: mol_type = other RNA
tgggcgtcagtggtctttctct

SEQ ID NO: 13543 - RNA, 22 nt, synthetic construct
  source 1..22: mol_type = other RNA
tgggcgtggagaacgatcttgt

SEQ ID NO: 13544 - RNA, 22 nt, synthetic construct
  source 1..22: mol_type = other RNA
tggggagggccaggcccacgac

SEQ ID NO: 13545 - RNA, 22 nt, synthetic construct
  source 1..22: mol_type = other RNA
tggggcccgatcgtgaggttcg

SEQ ID NO: 13546 - RNA, 22 nt, synthetic construct
  source 1..22: mol_type = other RNA
tggggcgggtaggtaggtgggg

SEQ ID NO: 13547 - RNA, 22 nt, synthetic construct
  source 1..22: mol_type = other RNA
tggggctgcgtgagtctctgag

SEQ ID NO: 13548 - RNA, 22 nt, synthetic construct
  source 1..22: mol_type = other RNA
tgggggaggagcgggggtcggt

SEQ ID NO: 13549 - RNA, 22 nt, synthetic construct
  source 1..22: mol_type = other RNA
tgggggaggggaagcgtcctga

SEQ ID NO: 13550 - RNA, 22 nt, synthetic construct
  source 1..22: mol_type = other RNA
tgggggccgcgatctcccctcc

SEQ ID NO: 13551 - RNA, 22 nt, synthetic construct
  source 1..22: mol_type = other RNA
tggggggatgggtggctagggg

SEQ ID NO: 13552 - RNA, 22 nt, synthetic construct
  source 1..22: mol_type = other RNA
tggggggcagaaaggcggagcg

SEQ ID NO: 13553 - RNA, 22 nt, synthetic construct
  source 1..22: mol_type = other RNA
tgggggtggcgaaggtaatgcc

SEQ ID NO: 13554 - RNA, 22 nt, synthetic construct
  source 1..22: mol_type = other RNA
tgggggtgggggaggagcgggg

SEQ ID NO: 13555 - RNA, 22 nt, synthetic construct
  source 1..22: mol_type = other RNA
tgggggtggggggcagaaaggc

SEQ ID NO: 13556 - RNA, 22 nt, synthetic construct
  source 1..22: mol_type = other RNA
tggggtgtagagatgctgggtg

SEQ ID NO: 13557 - RNA, 22 nt, synthetic construct
  source 1..22: mol_type = other RNA
tggggtgttgcaacggtgtgtg

SEQ ID NO: 13558 - RNA, 22 nt, synthetic construct
  source 1..22: mol_type = other RNA
tgggtcaggacgcttcccctcc

SEQ ID NO: 13559 - RNA, 22 nt, synthetic construct
  source 1..22: mol_type = other RNA
tgggtcgcctagattagagggg

SEQ ID NO: 13560 - RNA, 22 nt, synthetic construct
  source 1..22: mol_type = other RNA
tgggtcgtgggcctggccctcc

SEQ ID NO: 13561 - RNA, 22 nt, synthetic construct
  source 1..22: mol_type = other RNA
tgggtgcggggcggtgggcgga

SEQ ID NO: 13562 - RNA, 22 nt, synthetic construct
  source 1..22: mol_type = other RNA
tgggtggctaggggggccgtct

SEQ ID NO: 13563 - RNA, 22 nt, synthetic construct
  source 1..22: mol_type = other RNA
tgggtggggcgggtaggtaggt

SEQ ID NO: 13564 - RNA, 22 nt, synthetic construct
  source 1..22: mol_type = other RNA
tggtacggtcctccccgaggcc

SEQ ID NO: 13565 - RNA, 22 nt, synthetic construct
  source 1..22: mol_type = other RNA
tggtctttctcttggatatgga

SEQ ID NO: 13566 - RNA, 22 nt, synthetic construct
  source 1..22: mol_type = other RNA
tggtggcttgcgggggttgcct

SEQ ID NO: 13567 - RNA, 22 nt, synthetic construct
  source 1..22: mol_type = other RNA
tggtgggaggggaggtgcggta

SEQ ID NO: 13568 - RNA, 22 nt, synthetic construct
  source 1..22: mol_type = other RNA
tggtgggggtggcgaaggtaat

SEQ ID NO: 13569 - RNA, 22 nt, synthetic construct
  source 1..22: mol_type = other RNA
tggttcaagtaggtaaatcgca

SEQ ID NO: 13570 - RNA, 22 nt, synthetic construct
  source 1..22: mol_type = other RNA
tggttggagtaaagctcctgtc

SEQ ID NO: 13571 - RNA, 22 nt, synthetic construct
  source 1..22: mol_type = other RNA
tggtttcgctcatgtgagactc

SEQ ID NO: 13572 - RNA, 22 nt, synthetic construct
  source 1..22: mol_type = other RNA
tgtaagtcgggaatgtgaagag

SEQ ID NO: 13573 - RNA, 22 nt, synthetic construct
  source 1..22: mol_type = other RNA
tgtaccgcacctcccctcccac

SEQ ID NO: 13574 - RNA, 22 nt, synthetic construct
  source 1..22: mol_type = other RNA
tgtagagatgctgggtgtgcgg

SEQ ID NO: 13575 - RNA, 22 nt, synthetic construct
  source 1..22: mol_type = other RNA
tgtagcaggtcgggcttgtctc

SEQ ID NO: 13576 - RNA, 22 nt, synthetic construct
  source 1..22: mol_type = other RNA
tgtaggaaagagccctggttca

SEQ ID NO: 13577 - RNA, 22 nt, synthetic construct
  source 1..22: mol_type = other RNA
tgtagggttcgagcctggagtt

SEQ ID NO: 13578 - RNA, 22 nt, synthetic construct
  source 1..22: mol_type = other RNA
tgtatttcgagcggagggcagc

SEQ ID NO: 13579 - RNA, 22 nt, synthetic construct
  source 1..22: mol_type = other RNA
tgtcacaaggccgcgagaacgg

SEQ ID NO: 13580 - RNA, 22 nt, synthetic construct
  source 1..22: mol_type = other RNA
tgtcagttacgccgtcgggagt

SEQ ID NO: 13581 - RNA, 22 nt, synthetic construct
  source 1..22: mol_type = other RNA
tgtcgaagacaagcaggcggcg

SEQ ID NO: 13582 - RNA, 22 nt, synthetic construct
  source 1..22: mol_type = other RNA
tgtcgaagctgtgggaccgggc

SEQ ID NO: 13583 - RNA, 22 nt, synthetic construct
  source 1..22: mol_type = other RNA
tgtcgccgattggccgtttctc

SEQ ID NO: 13584 - RNA, 22 nt, synthetic construct
  source 1..22: mol_type = other RNA
tgtcggacccttaccttgtccc

SEQ ID NO: 13585 - RNA, 22 nt, synthetic construct
  source 1..22: mol_type = other RNA
tgtcgttttacttgccttgggc

SEQ ID NO: 13586 - RNA, 22 nt, synthetic construct
  source 1..22: mol_type = other RNA
tgtctcacttcttgggcgtcag

SEQ ID NO: 13587 - RNA, 22 nt, synthetic construct
  source 1..22: mol_type = other RNA
tgtctcgcccttcaggcggtgg

SEQ ID NO: 13588 - RNA, 22 nt, synthetic construct
  source 1..22: mol_type = other RNA
tgtctgagatagcctcgttgaa

SEQ ID NO: 13589 - RNA, 22 nt, synthetic construct
  source 1..22: mol_type = other RNA
tgtctggccccgcgcccctgcg

SEQ ID NO: 13590 - RNA, 22 nt, synthetic construct
  source 1..22: mol_type = other RNA
tgtctgtcacaaggccgcgaga

SEQ ID NO: 13591 - RNA, 22 nt, synthetic construct
  source 1..22: mol_type = other RNA
tgtcttcgacacctgattggct

SEQ ID NO: 13592 - RNA, 22 nt, synthetic construct
  source 1..22: mol_type = other RNA
tgtgaaaacacaaatggcgtat

SEQ ID NO: 13593 - RNA, 22 nt, synthetic construct
  source 1..22: mol_type = other RNA
tgtgaagaggagtgtaggaaag

SEQ ID NO: 13594 - RNA, 22 nt, synthetic construct
  source 1..22: mol_type = other RNA
tgtgacagacaactctgatcgc

SEQ ID NO: 13595 - RNA, 22 nt, synthetic construct
  source 1..22: mol_type = other RNA
tgtgagaatatcttcaaaggca

SEQ ID NO: 13596 - RNA, 22 nt, synthetic construct
  source 1..22: mol_type = other RNA
tgtgagactcgagccagtagca

SEQ ID NO: 13597 - RNA, 22 nt, synthetic construct
  source 1..22: mol_type = other RNA
tgtgcaaggcggcgaggggggt

SEQ ID NO: 13598 - RNA, 22 nt, synthetic construct
  source 1..22: mol_type = other RNA
tgtgccacagcgtgtctgagat

SEQ ID NO: 13599 - RNA, 22 nt, synthetic construct
  source 1..22: mol_type = other RNA
tgtgcttcggcgctccggctcc

SEQ ID NO: 13600 - RNA, 22 nt, synthetic construct
  source 1..22: mol_type = other RNA
tgtggcacacgccacggggagc

SEQ ID NO: 13601 - RNA, 22 nt, synthetic construct
  source 1..22: mol_type = other RNA
tgtgggaccgggcccttgctac

SEQ ID NO: 13602 - RNA, 22 nt, synthetic construct
  source 1..22: mol_type = other RNA
tgtggtgggggtggcgaaggta

SEQ ID NO: 13603 - RNA, 22 nt, synthetic construct
  source 1..22: mol_type = other RNA
tgtgtagggttcgagcctggag

SEQ ID NO: 13604 - RNA, 22 nt, synthetic construct
  source 1..22: mol_type = other RNA
tgtgtatttcgagcggagggca

SEQ ID NO: 13605 - RNA, 22 nt, synthetic construct
  source 1..22: mol_type = other RNA
tgtgtcgttttacttgccttgg

SEQ ID NO: 13606 - RNA, 22 nt, synthetic construct
  source 1..22: mol_type = other RNA
tgtgtgaaaacacaaatggcgt

SEQ ID NO: 13607 - RNA, 22 nt, synthetic construct
  source 1..22: mol_type = other RNA
tgtgtgcaaggcggcgaggggg

SEQ ID NO: 13608 - RNA, 22 nt, synthetic construct
  source 1..22: mol_type = other RNA
tgtgttggcggactggcgggac

SEQ ID NO: 13609 - RNA, 22 nt, synthetic construct
  source 1..22: mol_type = other RNA
tgtgttttcacacacggcggga

SEQ ID NO: 13610 - RNA, 22 nt, synthetic construct
  source 1..22: mol_type = other RNA
tgttacgttgggagggaaaggg

SEQ ID NO: 13611 - RNA, 22 nt, synthetic construct
  source 1..22: mol_type = other RNA
tgttcccgacttcccacgggaa

SEQ ID NO: 13612 - RNA, 22 nt, synthetic construct
  source 1..22: mol_type = other RNA
tgttgcaacggtgtgtgcaagg

SEQ ID NO: 13613 - RNA, 22 nt, synthetic construct
  source 1..22: mol_type = other RNA
tgttggcggactggcgggactg

SEQ ID NO: 13614 - RNA, 22 nt, synthetic construct
  source 1..22: mol_type = other RNA
tgttgggaaagccccttctatg

SEQ ID NO: 13615 - RNA, 22 nt, synthetic construct
  source 1..22: mol_type = other RNA
tgtttgttacgttgggagggaa

SEQ ID NO: 13616 - RNA, 22 nt, synthetic construct
  source 1..22: mol_type = other RNA
tgttttcacacacggcgggagg

SEQ ID NO: 13617 - RNA, 22 nt, synthetic construct
  source 1..22: mol_type = other RNA
tgtttttcctgggtcaggacgc

SEQ ID NO: 13618 - RNA, 22 nt, synthetic construct
  source 1..22: mol_type = other RNA
ttaaactgttgggaaagcccct

SEQ ID NO: 13619 - RNA, 22 nt, synthetic construct
  source 1..22: mol_type = other RNA
ttaactttccctctcatgcgat

SEQ ID NO: 13620 - RNA, 22 nt, synthetic construct
  source 1..22: mol_type = other RNA
ttacacgcagagggaaagagaa

SEQ ID NO: 13621 - RNA, 22 nt, synthetic construct
  source 1..22: mol_type = other RNA
ttacccgccgcctgcttgtctt

SEQ ID NO: 13622 - RNA, 22 nt, synthetic construct
  source 1..22: mol_type = other RNA
ttacctacttgaaccagggctc

SEQ ID NO: 13623 - RNA, 22 nt, synthetic construct
  source 1..22: mol_type = other RNA
ttaccttcgccacccccaccac

SEQ ID NO: 13624 - RNA, 22 nt, synthetic construct
  source 1..22: mol_type = other RNA
ttaccttgtcccaggcgctgcc

SEQ ID NO: 13625 - RNA, 22 nt, synthetic construct
  source 1..22: mol_type = other RNA
ttacctttcccttgaggagagg

SEQ ID NO: 13626 - RNA, 22 nt, synthetic construct
  source 1..22: mol_type = other RNA
ttacgccgtcgggagtacgcag

SEQ ID NO: 13627 - RNA, 22 nt, synthetic construct
  source 1..22: mol_type = other RNA
ttacggaggggagatcgcggcc

SEQ ID NO: 13628 - RNA, 22 nt, synthetic construct
  source 1..22: mol_type = other RNA
ttacgttgggagggaaaggggt

SEQ ID NO: 13629 - RNA, 22 nt, synthetic construct
  source 1..22: mol_type = other RNA
ttactccaaccagaatacgcca

SEQ ID NO: 13630 - RNA, 22 nt, synthetic construct
  source 1..22: mol_type = other RNA
ttacttgccttgggcgtggaga

SEQ ID NO: 13631 - RNA, 22 nt, synthetic construct
  source 1..22: mol_type = other RNA
ttagagggggatctctctccct

SEQ ID NO: 13632 - RNA, 22 nt, synthetic construct
  source 1..22: mol_type = other RNA
ttagcatagaaggggctttccc

SEQ ID NO: 13633 - RNA, 22 nt, synthetic construct
  source 1..22: mol_type = other RNA
ttagcgactctcgcgttgcccc

SEQ ID NO: 13634 - RNA, 22 nt, synthetic construct
  source 1..22: mol_type = other RNA
ttaggaggatgctgccacttct

SEQ ID NO: 13635 - RNA, 22 nt, synthetic construct
  source 1..22: mol_type = other RNA
ttaggcccaacgcggcgccacg

SEQ ID NO: 13636 - RNA, 22 nt, synthetic construct
  source 1..22: mol_type = other RNA
ttatgaattctctttccctctg

SEQ ID NO: 13637 - RNA, 22 nt, synthetic construct
  source 1..22: mol_type = other RNA
ttatgttcccgacttcccacgg

SEQ ID NO: 13638 - RNA, 22 nt, synthetic construct
  source 1..22: mol_type = other RNA
ttcaaaggcagaaaaatattcc

SEQ ID NO: 13639 - RNA, 22 nt, synthetic construct
  source 1..22: mol_type = other RNA
ttcaacgaggctatctcagaca

SEQ ID NO: 13640 - RNA, 22 nt, synthetic construct
  source 1..22: mol_type = other RNA
ttcaagtaggtaaatcgcatga

SEQ ID NO: 13641 - RNA, 22 nt, synthetic construct
  source 1..22: mol_type = other RNA
ttcacacacggcgggaggagaa

SEQ ID NO: 13642 - RNA, 22 nt, synthetic construct
  source 1..22: mol_type = other RNA
ttcacattcccgacttacacgc

SEQ ID NO: 13643 - RNA, 22 nt, synthetic construct
  source 1..22: mol_type = other RNA
ttcaccccctttcctgggaact

SEQ ID NO: 13644 - RNA, 22 nt, synthetic construct
  source 1..22: mol_type = other RNA
ttcactgaccctcccctcccgc

SEQ ID NO: 13645 - RNA, 22 nt, synthetic construct
  source 1..22: mol_type = other RNA
ttcaggcggtgggaacccgggg

SEQ ID NO: 13646 - RNA, 22 nt, synthetic construct
  source 1..22: mol_type = other RNA
ttcataaagggaatatttttct

SEQ ID NO: 13647 - RNA, 22 nt, synthetic construct
  source 1..22: mol_type = other RNA
ttcatgtttttcctgggtcagg

SEQ ID NO: 13648 - RNA, 22 nt, synthetic construct
  source 1..22: mol_type = other RNA
ttcccaaaggcattaccttcgc

SEQ ID NO: 13649 - RNA, 22 nt, synthetic construct
  source 1..22: mol_type = other RNA
ttcccaacagtttaactttccc

SEQ ID NO: 13650 - RNA, 22 nt, synthetic construct
  source 1..22: mol_type = other RNA
ttcccaccgcctgaagggcgag

SEQ ID NO: 13651 - RNA, 22 nt, synthetic construct
  source 1..22: mol_type = other RNA
ttcccacctcagatggctgctt

SEQ ID NO: 13652 - RNA, 22 nt, synthetic construct
  source 1..22: mol_type = other RNA
ttcccacgggaaaggcaacccc

SEQ ID NO: 13653 - RNA, 22 nt, synthetic construct
  source 1..22: mol_type = other RNA
ttcccaggaaagggggtgaaga

SEQ ID NO: 13654 - RNA, 22 nt, synthetic construct
  source 1..22: mol_type = other RNA
ttcccagggagagagatccccc

SEQ ID NO: 13655 - RNA, 22 nt, synthetic construct
  source 1..22: mol_type = other RNA
ttcccctcccccaacgcctctt

SEQ ID NO: 13656 - RNA, 22 nt, synthetic construct
  source 1..22: mol_type = other RNA
ttcccgacttacacgcagaggg

SEQ ID NO: 13657 - RNA, 22 nt, synthetic construct
  source 1..22: mol_type = other RNA
ttcccgacttcccacgggaaag

SEQ ID NO: 13658 - RNA, 22 nt, synthetic construct
  source 1..22: mol_type = other RNA
ttcccggccaggaaacgccgtg

SEQ ID NO: 13659 - RNA, 22 nt, synthetic construct
  source 1..22: mol_type = other RNA
ttcccgtgggaagtcgggaaca

SEQ ID NO: 13660 - RNA, 22 nt, synthetic construct
  source 1..22: mol_type = other RNA
ttccctcccaacgtaacaaaca

SEQ ID NO: 13661 - RNA, 22 nt, synthetic construct
  source 1..22: mol_type = other RNA
ttccctcccctggggcccgatc

SEQ ID NO: 13662 - RNA, 22 nt, synthetic construct
  source 1..22: mol_type = other RNA
ttccctctcatgcgatttacct

SEQ ID NO: 13663 - RNA, 22 nt, synthetic construct
  source 1..22: mol_type = other RNA
ttccctctcgttttctggcttc

SEQ ID NO: 13664 - RNA, 22 nt, synthetic construct
  source 1..22: mol_type = other RNA
ttccctctgcgtgtaagtcggg

SEQ ID NO: 13665 - RNA, 22 nt, synthetic construct
  source 1..22: mol_type = other RNA
ttcccttgaggagaggcctctt

SEQ ID NO: 13666 - RNA, 22 nt, synthetic construct
  source 1..22: mol_type = other RNA
ttccctttatgaattctctttc

SEQ ID NO: 13667 - RNA, 22 nt, synthetic construct
  source 1..22: mol_type = other RNA
ttccgctcccctacctagccga

SEQ ID NO: 13668 - RNA, 22 nt, synthetic construct
  source 1..22: mol_type = other RNA
ttccgctcccttctccctcccc

SEQ ID NO: 13669 - RNA, 22 nt, synthetic construct
  source 1..22: mol_type = other RNA
ttccgctcgggcagcgggctga

SEQ ID NO: 13670 - RNA, 22 nt, synthetic construct
  source 1..22: mol_type = other RNA
ttccgctgattggcggcgagtg

SEQ ID NO: 13671 - RNA, 22 nt, synthetic construct
  source 1..22: mol_type = other RNA
ttccggctagcctcttgtcgcc

SEQ ID NO: 13672 - RNA, 22 nt, synthetic construct
  source 1..22: mol_type = other RNA
ttcctacactcctcttcacatt

SEQ ID NO: 13673 - RNA, 22 nt, synthetic construct
  source 1..22: mol_type = other RNA
ttcctgccacgttgcgcagggg

SEQ ID NO: 13674 - RNA, 22 nt, synthetic construct
  source 1..22: mol_type = other RNA
ttcctggacgccttccctctcg

SEQ ID NO: 13675 - RNA, 22 nt, synthetic construct
  source 1..22: mol_type = other RNA
ttcctggccgggaatggcccgt

SEQ ID NO: 13676 - RNA, 22 nt, synthetic construct
  source 1..22: mol_type = other RNA
ttcctgggaactgcctactcca

SEQ ID NO: 13677 - RNA, 22 nt, synthetic construct
  source 1..22: mol_type = other RNA
ttcctgggtcaggacgcttccc

SEQ ID NO: 13678 - RNA, 22 nt, synthetic construct
  source 1..22: mol_type = other RNA
ttccttcgggggagtcggttta

SEQ ID NO: 13679 - RNA, 22 nt, synthetic construct
  source 1..22: mol_type = other RNA
ttcgacacctgattggctgtcg

SEQ ID NO: 13680 - RNA, 22 nt, synthetic construct
  source 1..22: mol_type = other RNA
ttcgacagccaatcaggtgtcg

SEQ ID NO: 13681 - RNA, 22 nt, synthetic construct
  source 1..22: mol_type = other RNA
ttcgagcattttccgctccctt

SEQ ID NO: 13682 - RNA, 22 nt, synthetic construct
  source 1..22: mol_type = other RNA
ttcgagcctggagttgagccag

SEQ ID NO: 13683 - RNA, 22 nt, synthetic construct
  source 1..22: mol_type = other RNA
ttcgagcggagggcagcaagag

SEQ ID NO: 13684 - RNA, 22 nt, synthetic construct
  source 1..22: mol_type = other RNA
ttcgccacccccaccacacgtt

SEQ ID NO: 13685 - RNA, 22 nt, synthetic construct
  source 1..22: mol_type = other RNA
ttcgctcatgtgagactcgagc

SEQ ID NO: 13686 - RNA, 22 nt, synthetic construct
  source 1..22: mol_type = other RNA
ttcggcgctccggctcctcaga

SEQ ID NO: 13687 - RNA, 22 nt, synthetic construct
  source 1..22: mol_type = other RNA
ttcgggggagtcggtttacccg

SEQ ID NO: 13688 - RNA, 22 nt, synthetic construct
  source 1..22: mol_type = other RNA
ttcggtctcttttctgtcggac

SEQ ID NO: 13689 - RNA, 22 nt, synthetic construct
  source 1..22: mol_type = other RNA
ttctatagagtccttgcttgtc

SEQ ID NO: 13690 - RNA, 22 nt, synthetic construct
  source 1..22: mol_type = other RNA
ttctatgctaattgattctata

SEQ ID NO: 13691 - RNA, 22 nt, synthetic construct
  source 1..22: mol_type = other RNA
ttctcacaagatcgttctccac

SEQ ID NO: 13692 - RNA, 22 nt, synthetic construct
  source 1..22: mol_type = other RNA
ttctcacccccctcgccgcctt

SEQ ID NO: 13693 - RNA, 22 nt, synthetic construct
  source 1..22: mol_type = other RNA
ttctccacgcccaaggcaagta

SEQ ID NO: 13694 - RNA, 22 nt, synthetic construct
  source 1..22: mol_type = other RNA
ttctccctccccctccggttgc

SEQ ID NO: 13695 - RNA, 22 nt, synthetic construct
  source 1..22: mol_type = other RNA
ttctcctcccgccgtgtgtgaa

SEQ ID NO: 13696 - RNA, 22 nt, synthetic construct
  source 1..22: mol_type = other RNA
ttctcgcggccttgtgacagac

SEQ ID NO: 13697 - RNA, 22 nt, synthetic construct
  source 1..22: mol_type = other RNA
ttctctaggcggccccggcggc

SEQ ID NO: 13698 - RNA, 22 nt, synthetic construct
  source 1..22: mol_type = other RNA
ttctctccccgatcccccactc

SEQ ID NO: 13699 - RNA, 22 nt, synthetic construct
  source 1..22: mol_type = other RNA
ttctctggctccccgtggcgtg

SEQ ID NO: 13700 - RNA, 22 nt, synthetic construct
  source 1..22: mol_type = other RNA
ttctctttccctctgcgtgtaa

SEQ ID NO: 13701 - RNA, 22 nt, synthetic construct
  source 1..22: mol_type = other RNA
ttctgccccccacccccacctc

SEQ ID NO: 13702 - RNA, 22 nt, synthetic construct
  source 1..22: mol_type = other RNA
ttctgcctttgaagatattctc

SEQ ID NO: 13703 - RNA, 22 nt, synthetic construct
  source 1..22: mol_type = other RNA
ttctggatggcggcggccgcgg

SEQ ID NO: 13704 - RNA, 22 nt, synthetic construct
  source 1..22: mol_type = other RNA
ttctggcttcccacctcagatg

SEQ ID NO: 13705 - RNA, 22 nt, synthetic construct
  source 1..22: mol_type = other RNA
ttctggttggagtaaagctcct

SEQ ID NO: 13706 - RNA, 22 nt, synthetic construct
  source 1..22: mol_type = other RNA
ttctgtcggacccttaccttgt

SEQ ID NO: 13707 - RNA, 22 nt, synthetic construct
  source 1..22: mol_type = other RNA
ttcttgggcgtcagtggtcttt

SEQ ID NO: 13708 - RNA, 22 nt, synthetic construct
  source 1..22: mol_type = other RNA
ttgaaccagggctctttcctac

SEQ ID NO: 13709 - RNA, 22 nt, synthetic construct
  source 1..22: mol_type = other RNA
ttgaagatattctcacaagatc

SEQ ID NO: 13710 - RNA, 22 nt, synthetic construct
  source 1..22: mol_type = other RNA
ttgaatgtgtagggttcgagcc

SEQ ID NO: 13711 - RNA, 22 nt, synthetic construct
  source 1..22: mol_type = other RNA
ttgagccagattgtgtcgtttt

SEQ ID NO: 13712 - RNA, 22 nt, synthetic construct
  source 1..22: mol_type = other RNA
ttgaggagaggcctcttgctgc

SEQ ID NO: 13713 - RNA, 22 nt, synthetic construct
  source 1..22: mol_type = other RNA
ttgattctatagagtccttgct

SEQ ID NO: 13714 - RNA, 22 nt, synthetic construct
  source 1..22: mol_type = other RNA
ttgcaacaccccattttcccag

SEQ ID NO: 13715 - RNA, 22 nt, synthetic construct
  source 1..22: mol_type = other RNA
ttgcaacggtgtgtgcaaggcg

SEQ ID NO: 13716 - RNA, 22 nt, synthetic construct
  source 1..22: mol_type = other RNA
ttgcacacaccgttgcaacacc

SEQ ID NO: 13717 - RNA, 22 nt, synthetic construct
  source 1..22: mol_type = other RNA
ttgccccctgggtggggcgggt

SEQ ID NO: 13718 - RNA, 22 nt, synthetic construct
  source 1..22: mol_type = other RNA
ttgccgcagggcgggcctccct

SEQ ID NO: 13719 - RNA, 22 nt, synthetic construct
  source 1..22: mol_type = other RNA
ttgccttgggcgtggagaacga

SEQ ID NO: 13720 - RNA, 22 nt, synthetic construct
  source 1..22: mol_type = other RNA
ttgcctttcccgtgggaagtcg

SEQ ID NO: 13721 - RNA, 22 nt, synthetic construct
  source 1..22: mol_type = other RNA
ttgcgcaggggcgcggggccag

SEQ ID NO: 13722 - RNA, 22 nt, synthetic construct
  source 1..22: mol_type = other RNA
ttgcgggggttgcctttcccgt

SEQ ID NO: 13723 - RNA, 22 nt, synthetic construct
  source 1..22: mol_type = other RNA
ttgctactggctcgagtctcac

SEQ ID NO: 13724 - RNA, 22 nt, synthetic construct
  source 1..22: mol_type = other RNA
ttgctctcgcagagggaggagc

SEQ ID NO: 13725 - RNA, 22 nt, synthetic construct
  source 1..22: mol_type = other RNA
ttgctgccctccgctcgaaata

SEQ ID NO: 13726 - RNA, 22 nt, synthetic construct
  source 1..22: mol_type = other RNA
ttgcttgtctcacttcttgggc

SEQ ID NO: 13727 - RNA, 22 nt, synthetic construct
  source 1..22: mol_type = other RNA
ttggagtaaagctcctgtcagt

SEQ ID NO: 13728 - RNA, 22 nt, synthetic construct
  source 1..22: mol_type = other RNA
ttggcccactcgccgccaatca

SEQ ID NO: 13729 - RNA, 22 nt, synthetic construct
  source 1..22: mol_type = other RNA
ttggccgtttctcctcccgccg

SEQ ID NO: 13730 - RNA, 22 nt, synthetic construct
  source 1..22: mol_type = other RNA
ttggcctctccgcccaccgccc

SEQ ID NO: 13731 - RNA, 22 nt, synthetic construct
  source 1..22: mol_type = other RNA
ttggcggactggcgggactggg

SEQ ID NO: 13732 - RNA, 22 nt, synthetic construct
  source 1..22: mol_type = other RNA
ttggcggcgagtgggccaatgg

SEQ ID NO: 13733 - RNA, 22 nt, synthetic construct
  source 1..22: mol_type = other RNA
ttggctcgctccgcctttctgc

SEQ ID NO: 13734 - RNA, 22 nt, synthetic construct
  source 1..22: mol_type = other RNA
ttggctgtcgaagctgtgggac

SEQ ID NO: 13735 - RNA, 22 nt, synthetic construct
  source 1..22: mol_type = other RNA
ttgggaaagccccttctatgct

SEQ ID NO: 13736 - RNA, 22 nt, synthetic construct
  source 1..22: mol_type = other RNA
ttgggaagcagccatctgaggt

SEQ ID NO: 13737 - RNA, 22 nt, synthetic construct
  source 1..22: mol_type = other RNA
ttgggagggaaaggggtggctg

SEQ ID NO: 13738 - RNA, 22 nt, synthetic construct
  source 1..22: mol_type = other RNA
ttgggcctaactcgagtcctgc

SEQ ID NO: 13739 - RNA, 22 nt, synthetic construct
  source 1..22: mol_type = other RNA
ttgggcgtcagtggtctttctc

SEQ ID NO: 13740 - RNA, 22 nt, synthetic construct
  source 1..22: mol_type = other RNA
ttgggcgtggagaacgatcttg

SEQ ID NO: 13741 - RNA, 22 nt, synthetic construct
  source 1..22: mol_type = other RNA
ttggggagggccaggcccacga

SEQ ID NO: 13742 - RNA, 22 nt, synthetic construct
  source 1..22: mol_type = other RNA
ttgggggaggggaagcgtcctg

SEQ ID NO: 13743 - RNA, 22 nt, synthetic construct
  source 1..22: mol_type = other RNA
ttgggtcgcctagattagaggg

SEQ ID NO: 13744 - RNA, 22 nt, synthetic construct
  source 1..22: mol_type = other RNA
ttgggtcgtgggcctggccctc

SEQ ID NO: 13745 - RNA, 22 nt, synthetic construct
  source 1..22: mol_type = other RNA
ttggtacggtcctccccgaggc

SEQ ID NO: 13746 - RNA, 22 nt, synthetic construct
  source 1..22: mol_type = other RNA
ttgtcccaggcgctgccggggc

SEQ ID NO: 13747 - RNA, 22 nt, synthetic construct
  source 1..22: mol_type = other RNA
ttgtcgccgattggccgtttct

SEQ ID NO: 13748 - RNA, 22 nt, synthetic construct
  source 1..22: mol_type = other RNA
ttgtctcacttcttgggcgtca

SEQ ID NO: 13749 - RNA, 22 nt, synthetic construct
  source 1..22: mol_type = other RNA
ttgtctcgcccttcaggcggtg

SEQ ID NO: 13750 - RNA, 22 nt, synthetic construct
  source 1..22: mol_type = other RNA
ttgtctgtcacaaggccgcgag

SEQ ID NO: 13751 - RNA, 22 nt, synthetic construct
  source 1..22: mol_type = other RNA
ttgtcttcgacacctgattggc

SEQ ID NO: 13752 - RNA, 22 nt, synthetic construct
  source 1..22: mol_type = other RNA
ttgtgacagacaactctgatcg

SEQ ID NO: 13753 - RNA, 22 nt, synthetic construct
  source 1..22: mol_type = other RNA
ttgtgagaatatcttcaaaggc

SEQ ID NO: 13754 - RNA, 22 nt, synthetic construct
  source 1..22: mol_type = other RNA
ttgtgtcgttttacttgccttg

SEQ ID NO: 13755 - RNA, 22 nt, synthetic construct
  source 1..22: mol_type = other RNA
ttgtgttttcacacacggcggg

SEQ ID NO: 13756 - RNA, 22 nt, synthetic construct
  source 1..22: mol_type = other RNA
ttgttacgttgggagggaaagg

SEQ ID NO: 13757 - RNA, 22 nt, synthetic construct
  source 1..22: mol_type = other RNA
tttaactttccctctcatgcga

SEQ ID NO: 13758 - RNA, 22 nt, synthetic construct
  source 1..22: mol_type = other RNA
tttacccgccgcctgcttgtct

SEQ ID NO: 13759 - RNA, 22 nt, synthetic construct
  source 1..22: mol_type = other RNA
tttacctacttgaaccagggct

SEQ ID NO: 13760 - RNA, 22 nt, synthetic construct
  source 1..22: mol_type = other RNA
tttacctttcccttgaggagag

SEQ ID NO: 13761 - RNA, 22 nt, synthetic construct
  source 1..22: mol_type = other RNA
tttactccaaccagaatacgcc

SEQ ID NO: 13762 - RNA, 22 nt, synthetic construct
  source 1..22: mol_type = other RNA
tttacttgccttgggcgtggag

SEQ ID NO: 13763 - RNA, 22 nt, synthetic construct
  source 1..22: mol_type = other RNA
tttatgaattctctttccctct

SEQ ID NO: 13764 - RNA, 22 nt, synthetic construct
  source 1..22: mol_type = other RNA
tttcacacacggcgggaggaga

SEQ ID NO: 13765 - RNA, 22 nt, synthetic construct
  source 1..22: mol_type = other RNA
tttcactgaccctcccctcccg

SEQ ID NO: 13766 - RNA, 22 nt, synthetic construct
  source 1..22: mol_type = other RNA
tttcatgtttttcctgggtcag

SEQ ID NO: 13767 - RNA, 22 nt, synthetic construct
  source 1..22: mol_type = other RNA
tttcccaacagtttaactttcc

SEQ ID NO: 13768 - RNA, 22 nt, synthetic construct
  source 1..22: mol_type = other RNA
tttcccagggagagagatcccc

SEQ ID NO: 13769 - RNA, 22 nt, synthetic construct
  source 1..22: mol_type = other RNA
tttcccgtgggaagtcgggaac

SEQ ID NO: 13770 - RNA, 22 nt, synthetic construct
  source 1..22: mol_type = other RNA
tttccctcccaacgtaacaaac

SEQ ID NO: 13771 - RNA, 22 nt, synthetic construct
  source 1..22: mol_type = other RNA
tttccctctcatgcgatttacc

SEQ ID NO: 13772 - RNA, 22 nt, synthetic construct
  source 1..22: mol_type = other RNA
tttccctctgcgtgtaagtcgg

SEQ ID NO: 13773 - RNA, 22 nt, synthetic construct
  source 1..22: mol_type = other RNA
tttcccttgaggagaggcctct

SEQ ID NO: 13774 - RNA, 22 nt, synthetic construct
  source 1..22: mol_type = other RNA
tttccgctcccttctccctccc

SEQ ID NO: 13775 - RNA, 22 nt, synthetic construct
  source 1..22: mol_type = other RNA
tttccgctcgggcagcgggctg

SEQ ID NO: 13776 - RNA, 22 nt, synthetic construct
  source 1..22: mol_type = other RNA
tttcctacactcctcttcacat

SEQ ID NO: 13777 - RNA, 22 nt, synthetic construct
  source 1..22: mol_type = other RNA
tttcctggccgggaatggcccg

SEQ ID NO: 13778 - RNA, 22 nt, synthetic construct
  source 1..22: mol_type = other RNA
tttcctgggaactgcctactcc

SEQ ID NO: 13779 - RNA, 22 nt, synthetic construct
  source 1..22: mol_type = other RNA
tttcctgggtcaggacgcttcc

SEQ ID NO: 13780 - RNA, 22 nt, synthetic construct
  source 1..22: mol_type = other RNA
tttcgagcattttccgctccct

SEQ ID NO: 13781 - RNA, 22 nt, synthetic construct
  source 1..22: mol_type = other RNA
tttcgagcggagggcagcaaga

SEQ ID NO: 13782 - RNA, 22 nt, synthetic construct
  source 1..22: mol_type = other RNA
tttcgctcatgtgagactcgag

SEQ ID NO: 13783 - RNA, 22 nt, synthetic construct
  source 1..22: mol_type = other RNA
tttctcctcccgccgtgtgtga

SEQ ID NO: 13784 - RNA, 22 nt, synthetic construct
  source 1..22: mol_type = other RNA
tttctctccccgatcccccact

SEQ ID NO: 13785 - RNA, 22 nt, synthetic construct
  source 1..22: mol_type = other RNA
tttctgccccccacccccacct

SEQ ID NO: 13786 - RNA, 22 nt, synthetic construct
  source 1..22: mol_type = other RNA
tttctgcctttgaagatattct

SEQ ID NO: 13787 - RNA, 22 nt, synthetic construct
  source 1..22: mol_type = other RNA
tttctggcttcccacctcagat

SEQ ID NO: 13788 - RNA, 22 nt, synthetic construct
  source 1..22: mol_type = other RNA
tttctgtcggacccttaccttg

SEQ ID NO: 13789 - RNA, 22 nt, synthetic construct
  source 1..22: mol_type = other RNA
tttgaagatattctcacaagat

SEQ ID NO: 13790 - RNA, 22 nt, synthetic construct
  source 1..22: mol_type = other RNA
tttggctcgctccgcctttctg

SEQ ID NO: 13791 - RNA, 22 nt, synthetic construct
  source 1..22: mol_type = other RNA
tttgggaagcagccatctgagg

SEQ ID NO: 13792 - RNA, 22 nt, synthetic construct
  source 1..22: mol_type = other RNA
tttgtgttttcacacacggcgg

SEQ ID NO: 13793 - RNA, 22 nt, synthetic construct
  source 1..22: mol_type = other RNA
tttgttacgttgggagggaaag

SEQ ID NO: 13794 - RNA, 22 nt, synthetic construct
  source 1..22: mol_type = other RNA
ttttacttgccttgggcgtgga

SEQ ID NO: 13795 - RNA, 22 nt, synthetic construct
  source 1..22: mol_type = other RNA
ttttcacacacggcgggaggag

SEQ ID NO: 13796 - RNA, 22 nt, synthetic construct
  source 1..22: mol_type = other RNA
ttttcccagggagagagatccc

SEQ ID NO: 13797 - RNA, 22 nt, synthetic construct
  source 1..22: mol_type = other RNA
ttttccgctcccttctccctcc

SEQ ID NO: 13798 - RNA, 22 nt, synthetic construct
  source 1..22: mol_type = other RNA
ttttcctgggtcaggacgcttc

SEQ ID NO: 13799 - RNA, 22 nt, synthetic construct
  source 1..22: mol_type = other RNA
ttttctctccccgatcccccac

SEQ ID NO: 13800 - RNA, 22 nt, synthetic construct
  source 1..22: mol_type = other RNA
ttttctgcctttgaagatattc

SEQ ID NO: 13801 - RNA, 22 nt, synthetic construct
  source 1..22: mol_type = other RNA
ttttctggcttcccacctcaga

SEQ ID NO: 13802 - RNA, 22 nt, synthetic construct
  source 1..22: mol_type = other RNA
ttttctgtcggacccttacctt

SEQ ID NO: 13803 - RNA, 22 nt, synthetic construct
  source 1..22: mol_type = other RNA
tttttcctgggtcaggacgctt

SEQ ID NO: 13804 - RNA, 22 nt, synthetic construct
  source 1..22: mol_type = other RNA
tttttctctccccgatccccca

SEQ ID NO: 13805 - RNA, 22 nt, synthetic construct
  source 1..22: mol_type = other RNA
tttttctgcctttgaagatatt

SEQ ID NO: 13806 - RNA, 22 nt, synthetic construct
  source 1..22: mol_type = other RNA
ttttttctctccccgatccccc

SEQ ID NO: 13807 - RNA, 20 nt, synthetic construct
  source 1..20: mol_type = other RNA
aaaaaccggcgcgagctgca

SEQ ID NO: 13808 - RNA, 20 nt, synthetic construct
  source 1..20: mol_type = other RNA
aaaaccggcgcgagctgcaa

SEQ ID NO: 13809 - RNA, 20 nt, synthetic construct
  source 1..20: mol_type = other RNA
aaaccggcgcgagctgcaat

SEQ ID NO: 13810 - RNA, 20 nt, synthetic construct
  source 1..20: mol_type = other RNA
aaccggcgcgagctgcaatc

SEQ ID NO: 13811 - RNA, 20 nt, synthetic construct
  source 1..20: mol_type = other RNA
aagggtgcggccttctctcc

SEQ ID NO: 13812 - RNA, 20 nt, synthetic construct
  source 1..20: mol_type = other RNA
aatcctgagggagctgcggt

SEQ ID NO: 13813 - RNA, 20 nt, synthetic construct
  source 1..20: mol_type = other RNA
accgcagctccctcaggatt

SEQ ID NO: 13814 - RNA, 20 nt, synthetic construct
  source 1..20: mol_type = other RNA
accggcgcgagctgcaatcc

SEQ ID NO: 13815 - RNA, 20 nt, synthetic construct
  source 1..20: mol_type = other RNA
acctcctccaccgcagctcc

SEQ ID NO: 13816 - RNA, 20 nt, synthetic construct
  source 1..20: mol_type = other RNA
agaagggtgcggccttctct

SEQ ID NO: 13817 - RNA, 20 nt, synthetic construct
  source 1..20: mol_type = other RNA
agctccctcaggattgcagc

SEQ ID NO: 13818 - RNA, 20 nt, synthetic construct
  source 1..20: mol_type = other RNA
agctcgcgccggtttttgga

SEQ ID NO: 13819 - RNA, 20 nt, synthetic construct
  source 1..20: mol_type = other RNA
agctgcaatcctgagggagc

SEQ ID NO: 13820 - RNA, 20 nt, synthetic construct
  source 1..20: mol_type = other RNA
agctgcggtggaggaggtgg

SEQ ID NO: 13821 - RNA, 20 nt, synthetic construct
  source 1..20: mol_type = other RNA
aggaggtggagagaaggccg

SEQ ID NO: 13822 - RNA, 20 nt, synthetic construct
  source 1..20: mol_type = other RNA
aggattgcagctcgcgccgg

SEQ ID NO: 13823 - RNA, 20 nt, synthetic construct
  source 1..20: mol_type = other RNA
aggcgcttgttctccaaaaa

SEQ ID NO: 13824 - RNA, 20 nt, synthetic construct
  source 1..20: mol_type = other RNA
agggagctgcggtggaggag

SEQ ID NO: 13825 - RNA, 20 nt, synthetic construct
  source 1..20: mol_type = other RNA
agggtgcggccttctctcca

SEQ ID NO: 13826 - RNA, 20 nt, synthetic construct
  source 1..20: mol_type = other RNA
aggtggagagaaggccgcac

SEQ ID NO: 13827 - RNA, 20 nt, synthetic construct
  source 1..20: mol_type = other RNA
atcctgagggagctgcggtg

SEQ ID NO: 13828 - RNA, 20 nt, synthetic construct
  source 1..20: mol_type = other RNA
attgcagctcgcgccggttt

SEQ ID NO: 13829 - RNA, 20 nt, synthetic construct
  source 1..20: mol_type = other RNA
caaaaaccggcgcgagctgc

SEQ ID NO: 13830 - RNA, 20 nt, synthetic construct
  source 1..20: mol_type = other RNA
caatcctgagggagctgcgg

SEQ ID NO: 13831 - RNA, 20 nt, synthetic construct
  source 1..20: mol_type = other RNA
caccgcagctccctcaggat

SEQ ID NO: 13832 - RNA, 20 nt, synthetic construct
  source 1..20: mol_type = other RNA
cacctcctccaccgcagctc

SEQ ID NO: 13833 - RNA, 20 nt, synthetic construct
  source 1..20: mol_type = other RNA
cagaagggtgcggccttctc

SEQ ID NO: 13834 - RNA, 20 nt, synthetic construct
  source 1..20: mol_type = other RNA
cagctccctcaggattgcag

SEQ ID NO: 13835 - RNA, 20 nt, synthetic construct
  source 1..20: mol_type = other RNA
cagctcgcgccggtttttgg

SEQ ID NO: 13836 - RNA, 20 nt, synthetic construct
  source 1..20: mol_type = other RNA
caggattgcagctcgcgccg

SEQ ID NO: 13837 - RNA, 20 nt, synthetic construct
  source 1..20: mol_type = other RNA
ccaaaaaccggcgcgagctg

SEQ ID NO: 13838 - RNA, 20 nt, synthetic construct
  source 1..20: mol_type = other RNA
ccaccgcagctccctcagga

SEQ ID NO: 13839 - RNA, 20 nt, synthetic construct
  source 1..20: mol_type = other RNA
ccacctcctccaccgcagct

SEQ ID NO: 13840 - RNA, 20 nt, synthetic construct
  source 1..20: mol_type = other RNA
ccagaagggtgcggccttct

SEQ ID NO: 13841 - RNA, 20 nt, synthetic construct
  source 1..20: mol_type = other RNA
cccagaagggtgcggccttc

SEQ ID NO: 13842 - RNA, 20 nt, synthetic construct
  source 1..20: mol_type = other RNA
ccctcaggattgcagctcgc

SEQ ID NO: 13843 - RNA, 20 nt, synthetic construct
  source 1..20: mol_type = other RNA
ccgcagctccctcaggattg

SEQ ID NO: 13844 - RNA, 20 nt, synthetic construct
  source 1..20: mol_type = other RNA
ccggcgcgagctgcaatcct

SEQ ID NO: 13845 - RNA, 20 nt, synthetic construct
  source 1..20: mol_type = other RNA
ccggtttttggagaacaagc

SEQ ID NO: 13846 - RNA, 20 nt, synthetic construct
  source 1..20: mol_type = other RNA
cctcaggattgcagctcgcg

SEQ ID NO: 13847 - RNA, 20 nt, synthetic construct
  source 1..20: mol_type = other RNA
cctccaccgcagctccctca

SEQ ID NO: 13848 - RNA, 20 nt, synthetic construct
  source 1..20: mol_type = other RNA
cctcctccaccgcagctccc

SEQ ID NO: 13849 - RNA, 20 nt, synthetic construct
  source 1..20: mol_type = other RNA
cctgagggagctgcggtgga

SEQ ID NO: 13850 - RNA, 20 nt, synthetic construct
  source 1..20: mol_type = other RNA
ccttctctccacctcctcca

SEQ ID NO: 13851 - RNA, 20 nt, synthetic construct
  source 1..20: mol_type = other RNA
cgagctgcaatcctgaggga

SEQ ID NO: 13852 - RNA, 20 nt, synthetic construct
  source 1..20: mol_type = other RNA
cgcagctccctcaggattgc

SEQ ID NO: 13853 - RNA, 20 nt, synthetic construct
  source 1..20: mol_type = other RNA
cgccggtttttggagaacaa

SEQ ID NO: 13854 - RNA, 20 nt, synthetic construct
  source 1..20: mol_type = other RNA
cgcgagctgcaatcctgagg

SEQ ID NO: 13855 - RNA, 20 nt, synthetic construct
  source 1..20: mol_type = other RNA
cgcgccggtttttggagaac

SEQ ID NO: 13856 - RNA, 20 nt, synthetic construct
  source 1..20: mol_type = other RNA
cgcttgttctccaaaaaccg

SEQ ID NO: 13857 - RNA, 20 nt, synthetic construct
  source 1..20: mol_type = other RNA
cggccttctctccacctcct

SEQ ID NO: 13858 - RNA, 20 nt, synthetic construct
  source 1..20: mol_type = other RNA
cggcgcgagctgcaatcctg

SEQ ID NO: 13859 - RNA, 20 nt, synthetic construct
  source 1..20: mol_type = other RNA
cggtggaggaggtggagaga

SEQ ID NO: 13860 - RNA, 20 nt, synthetic construct
  source 1..20: mol_type = other RNA
cggtttttggagaacaagcg

SEQ ID NO: 13861 - RNA, 20 nt, synthetic construct
  source 1..20: mol_type = other RNA
ctcaggattgcagctcgcgc

SEQ ID NO: 13862 - RNA, 20 nt, synthetic construct
  source 1..20: mol_type = other RNA
ctccaaaaaccggcgcgagc

SEQ ID NO: 13863 - RNA, 20 nt, synthetic construct
  source 1..20: mol_type = other RNA
ctccaccgcagctccctcag

SEQ ID NO: 13864 - RNA, 20 nt, synthetic construct
  source 1..20: mol_type = other RNA
ctccacctcctccaccgcag

SEQ ID NO: 13865 - RNA, 20 nt, synthetic construct
  source 1..20: mol_type = other RNA
ctccctcaggattgcagctc

SEQ ID NO: 13866 - RNA, 20 nt, synthetic construct
  source 1..20: mol_type = other RNA
ctcctccaccgcagctccct

SEQ ID NO: 13867 - RNA, 20 nt, synthetic construct
  source 1..20: mol_type = other RNA
ctcgcgccggtttttggaga

SEQ ID NO: 13868 - RNA, 20 nt, synthetic construct
  source 1..20: mol_type = other RNA
ctctccacctcctccaccgc

SEQ ID NO: 13869 - RNA, 20 nt, synthetic construct
  source 1..20: mol_type = other RNA
ctgagggagctgcggtggag

SEQ ID NO: 13870 - RNA, 20 nt, synthetic construct
  source 1..20: mol_type = other RNA
ctgcaatcctgagggagctg

SEQ ID NO: 13871 - RNA, 20 nt, synthetic construct
  source 1..20: mol_type = other RNA
ctgcccagaagggtgcggcc

SEQ ID NO: 13872 - RNA, 20 nt, synthetic construct
  source 1..20: mol_type = other RNA
ctgcggtggaggaggtggag

SEQ ID NO: 13873 - RNA, 20 nt, synthetic construct
  source 1..20: mol_type = other RNA
cttctctccacctcctccac

SEQ ID NO: 13874 - RNA, 20 nt, synthetic construct
  source 1..20: mol_type = other RNA
cttgttctccaaaaaccggc

SEQ ID NO: 13875 - RNA, 20 nt, synthetic construct
  source 1..20: mol_type = other RNA
gaagggtgcggccttctctc

SEQ ID NO: 13876 - RNA, 20 nt, synthetic construct
  source 1..20: mol_type = other RNA
gagctgcaatcctgagggag

SEQ ID NO: 13877 - RNA, 20 nt, synthetic construct
  source 1..20: mol_type = other RNA
gagctgcggtggaggaggtg

SEQ ID NO: 13878 - RNA, 20 nt, synthetic construct
  source 1..20: mol_type = other RNA
gaggaggtggagagaaggcc

SEQ ID NO: 13879 - RNA, 20 nt, synthetic construct
  source 1..20: mol_type = other RNA
gaggcgcttgttctccaaaa

SEQ ID NO: 13880 - RNA, 20 nt, synthetic construct
  source 1..20: mol_type = other RNA
gagggagctgcggtggagga

SEQ ID NO: 13881 - RNA, 20 nt, synthetic construct
  source 1..20: mol_type = other RNA
gaggtggagagaaggccgca

SEQ ID NO: 13882 - RNA, 20 nt, synthetic construct
  source 1..20: mol_type = other RNA
gattgcagctcgcgccggtt

SEQ ID NO: 13883 - RNA, 20 nt, synthetic construct
  source 1..20: mol_type = other RNA
gcaatcctgagggagctgcg

SEQ ID NO: 13884 - RNA, 20 nt, synthetic construct
  source 1..20: mol_type = other RNA
gcagctccctcaggattgca

SEQ ID NO: 13885 - RNA, 20 nt, synthetic construct
  source 1..20: mol_type = other RNA
gcagctcgcgccggtttttg

SEQ ID NO: 13886 - RNA, 20 nt, synthetic construct
  source 1..20: mol_type = other RNA
gcccagaagggtgcggcctt

SEQ ID NO: 13887 - RNA, 20 nt, synthetic construct
  source 1..20: mol_type = other RNA
gccggtttttggagaacaag

SEQ ID NO: 13888 - RNA, 20 nt, synthetic construct
  source 1..20: mol_type = other RNA
gccttctctccacctcctcc

SEQ ID NO: 13889 - RNA, 20 nt, synthetic construct
  source 1..20: mol_type = other RNA
gcgagctgcaatcctgaggg

SEQ ID NO: 13890 - RNA, 20 nt, synthetic construct
  source 1..20: mol_type = other RNA
gcgccggtttttggagaaca

SEQ ID NO: 13891 - RNA, 20 nt, synthetic construct
  source 1..20: mol_type = other RNA
gcgcgagctgcaatcctgag

SEQ ID NO: 13892 - RNA, 20 nt, synthetic construct
  source 1..20: mol_type = other RNA
gcgcttgttctccaaaaacc

SEQ ID NO: 13893 - RNA, 20 nt, synthetic construct
  source 1..20: mol_type = other RNA
gcggccttctctccacctcc

SEQ ID NO: 13894 - RNA, 20 nt, synthetic construct
  source 1..20: mol_type = other RNA
gcggtggaggaggtggagag

SEQ ID NO: 13895 - RNA, 20 nt, synthetic construct
  source 1..20: mol_type = other RNA
gctccctcaggattgcagct

SEQ ID NO: 13896 - RNA, 20 nt, synthetic construct
  source 1..20: mol_type = other RNA
gctcgcgccggtttttggag

SEQ ID NO: 13897 - RNA, 20 nt, synthetic construct
  source 1..20: mol_type = other RNA
gctgcaatcctgagggagct

SEQ ID NO: 13898 - RNA, 20 nt, synthetic construct
  source 1..20: mol_type = other RNA
gctgcggtggaggaggtgga

SEQ ID NO: 13899 - RNA, 20 nt, synthetic construct
  source 1..20: mol_type = other RNA
gcttgttctccaaaaaccgg

SEQ ID NO: 13900 - RNA, 20 nt, synthetic construct
  source 1..20: mol_type = other RNA
ggagagaaggccgcaccctt

SEQ ID NO: 13901 - RNA, 20 nt, synthetic construct
  source 1..20: mol_type = other RNA
ggagctgcggtggaggaggt

SEQ ID NO: 13902 - RNA, 20 nt, synthetic construct
  source 1..20: mol_type = other RNA
ggaggaggtggagagaaggc

SEQ ID NO: 13903 - RNA, 20 nt, synthetic construct
  source 1..20: mol_type = other RNA
ggaggcgcttgttctccaaa

SEQ ID NO: 13904 - RNA, 20 nt, synthetic construct
  source 1..20: mol_type = other RNA
ggaggtggagagaaggccgc

SEQ ID NO: 13905 - RNA, 20 nt, synthetic construct
  source 1..20: mol_type = other RNA
ggattgcagctcgcgccggt

SEQ ID NO: 13906 - RNA, 20 nt, synthetic construct
  source 1..20: mol_type = other RNA
ggccttctctccacctcctc

SEQ ID NO: 13907 - RNA, 20 nt, synthetic construct
  source 1..20: mol_type = other RNA
ggcgcgagctgcaatcctga

SEQ ID NO: 13908 - RNA, 20 nt, synthetic construct
  source 1..20: mol_type = other RNA
ggcgcttgttctccaaaaac

SEQ ID NO: 13909 - RNA, 20 nt, synthetic construct
  source 1..20: mol_type = other RNA
gggagctgcggtggaggagg

SEQ ID NO: 13910 - RNA, 20 nt, synthetic construct
  source 1..20: mol_type = other RNA
gggaggcgcttgttctccaa

SEQ ID NO: 13911 - RNA, 20 nt, synthetic construct
  source 1..20: mol_type = other RNA
gggtgcggccttctctccac

SEQ ID NO: 13912 - RNA, 20 nt, synthetic construct
  source 1..20: mol_type = other RNA
gggtgggaggcgcttgttct

SEQ ID NO: 13913 - RNA, 20 nt, synthetic construct
  source 1..20: mol_type = other RNA
ggtgcggccttctctccacc

SEQ ID NO: 13914 - RNA, 20 nt, synthetic construct
  source 1..20: mol_type = other RNA
ggtggagagaaggccgcacc

SEQ ID NO: 13915 - RNA, 20 nt, synthetic construct
  source 1..20: mol_type = other RNA
ggtggaggaggtggagagaa

SEQ ID NO: 13916 - RNA, 20 nt, synthetic construct
  source 1..20: mol_type = other RNA
ggtgggaggcgcttgttctc

SEQ ID NO: 13917 - RNA, 20 nt, synthetic construct
  source 1..20: mol_type = other RNA
ggtttttggagaacaagcgc

SEQ ID NO: 13918 - RNA, 20 nt, synthetic construct
  source 1..20: mol_type = other RNA
gtgcggccttctctccacct

SEQ ID NO: 13919 - RNA, 20 nt, synthetic construct
  source 1..20: mol_type = other RNA
gtggagagaaggccgcaccc

SEQ ID NO: 13920 - RNA, 20 nt, synthetic construct
  source 1..20: mol_type = other RNA
gtggaggaggtggagagaag

SEQ ID NO: 13921 - RNA, 20 nt, synthetic construct
  source 1..20: mol_type = other RNA
gtgggaggcgcttgttctcc

SEQ ID NO: 13922 - RNA, 20 nt, synthetic construct
  source 1..20: mol_type = other RNA
gtgggtgggaggcgcttgtt

SEQ ID NO: 13923 - RNA, 20 nt, synthetic construct
  source 1..20: mol_type = other RNA
gttctccaaaaaccggcgcg

SEQ ID NO: 13924 - RNA, 20 nt, synthetic construct
  source 1..20: mol_type = other RNA
gtttttggagaacaagcgcc

SEQ ID NO: 13925 - RNA, 20 nt, synthetic construct
  source 1..20: mol_type = other RNA
tcaggattgcagctcgcgcc

SEQ ID NO: 13926 - RNA, 20 nt, synthetic construct
  source 1..20: mol_type = other RNA
tccaaaaaccggcgcgagct

SEQ ID NO: 13927 - RNA, 20 nt, synthetic construct
  source 1..20: mol_type = other RNA
tccaccgcagctccctcagg

SEQ ID NO: 13928 - RNA, 20 nt, synthetic construct
  source 1..20: mol_type = other RNA
tccacctcctccaccgcagc

SEQ ID NO: 13929 - RNA, 20 nt, synthetic construct
  source 1..20: mol_type = other RNA
tccctcaggattgcagctcg

SEQ ID NO: 13930 - RNA, 20 nt, synthetic construct
  source 1..20: mol_type = other RNA
tcctccaccgcagctccctc

SEQ ID NO: 13931 - RNA, 20 nt, synthetic construct
  source 1..20: mol_type = other RNA
tcctgagggagctgcggtgg

SEQ ID NO: 13932 - RNA, 20 nt, synthetic construct
  source 1..20: mol_type = other RNA
tcgcgccggtttttggagaa

SEQ ID NO: 13933 - RNA, 20 nt, synthetic construct
  source 1..20: mol_type = other RNA
tctccaaaaaccggcgcgag

SEQ ID NO: 13934 - RNA, 20 nt, synthetic construct
  source 1..20: mol_type = other RNA
tctccacctcctccaccgca

SEQ ID NO: 13935 - RNA, 20 nt, synthetic construct
  source 1..20: mol_type = other RNA
tctctccacctcctccaccg

SEQ ID NO: 13936 - RNA, 20 nt, synthetic construct
  source 1..20: mol_type = other RNA
tgagggagctgcggtggagg

SEQ ID NO: 13937 - RNA, 20 nt, synthetic construct
  source 1..20: mol_type = other RNA
tgcaatcctgagggagctgc

SEQ ID NO: 13938 - RNA, 20 nt, synthetic construct
  source 1..20: mol_type = other RNA
tgcagctcgcgccggttttt

SEQ ID NO: 13939 - RNA, 20 nt, synthetic construct
  source 1..20: mol_type = other RNA
tgcccagaagggtgcggcct

SEQ ID NO: 13940 - RNA, 20 nt, synthetic construct
  source 1..20: mol_type = other RNA
tgcggccttctctccacctc

SEQ ID NO: 13941 - RNA, 20 nt, synthetic construct
  source 1..20: mol_type = other RNA
tgcggtggaggaggtggaga

SEQ ID NO: 13942 - RNA, 20 nt, synthetic construct
  source 1..20: mol_type = other RNA
tggagagaaggccgcaccct

SEQ ID NO: 13943 - RNA, 20 nt, synthetic construct
  source 1..20: mol_type = other RNA
tggaggaggtggagagaagg

SEQ ID NO: 13944 - RNA, 20 nt, synthetic construct
  source 1..20: mol_type = other RNA
tgggaggcgcttgttctcca

SEQ ID NO: 13945 - RNA, 20 nt, synthetic construct
  source 1..20: mol_type = other RNA
tgggtgggaggcgcttgttc

SEQ ID NO: 13946 - RNA, 20 nt, synthetic construct
  source 1..20: mol_type = other RNA
tgttctccaaaaaccggcgc

SEQ ID NO: 13947 - RNA, 20 nt, synthetic construct
  source 1..20: mol_type = other RNA
ttctccaaaaaccggcgcga

SEQ ID NO: 13948 - RNA, 20 nt, synthetic construct
  source 1..20: mol_type = other RNA
ttctctccacctcctccacc

SEQ ID NO: 13949 - RNA, 20 nt, synthetic construct
  source 1..20: mol_type = other RNA
ttgcagctcgcgccggtttt

SEQ ID NO: 13950 - RNA, 20 nt, synthetic construct
  source 1..20: mol_type = other RNA
ttgttctccaaaaaccggcg

SEQ ID NO: 13951 - RNA, 20 nt, synthetic construct
  source 1..20: mol_type = other RNA
ttttggagaacaagcgcctc

SEQ ID NO: 13952 - RNA, 20 nt, synthetic construct
  source 1..20: mol_type = other RNA
tttttggagaacaagcgcct

SEQ ID NO: 13953 - RNA, 21 nt, synthetic construct
  source 1..21: mol_type = other RNA
aaaaaccggcgcgagctgcaa

SEQ ID NO: 13954 - RNA, 21 nt, synthetic construct
  source 1..21: mol_type = other RNA
aaaaccggcgcgagctgcaat

SEQ ID NO: 13955 - RNA, 21 nt, synthetic construct
  source 1..21: mol_type = other RNA
aaaccggcgcgagctgcaatc

SEQ ID NO: 13956 - RNA, 21 nt, synthetic construct
  source 1..21: mol_type = other RNA
aaccggcgcgagctgcaatcc

SEQ ID NO: 13957 - RNA, 21 nt, synthetic construct
  source 1..21: mol_type = other RNA
aagggtgcggccttctctcca

SEQ ID NO: 13958 - RNA, 21 nt, synthetic construct
  source 1..21: mol_type = other RNA
aatcctgagggagctgcggtg

SEQ ID NO: 13959 - RNA, 21 nt, synthetic construct
  source 1..21: mol_type = other RNA
accgcagctccctcaggattg

SEQ ID NO: 13960 - RNA, 21 nt, synthetic construct
  source 1..21: mol_type = other RNA
accggcgcgagctgcaatcct

SEQ ID NO: 13961 - RNA, 21 nt, synthetic construct
  source 1..21: mol_type = other RNA
acctcctccaccgcagctccc

SEQ ID NO: 13962 - RNA, 21 nt, synthetic construct
  source 1..21: mol_type = other RNA
agaagggtgcggccttctctc

SEQ ID NO: 13963 - RNA, 21 nt, synthetic construct
  source 1..21: mol_type = other RNA
agctccctcaggattgcagct

SEQ ID NO: 13964 - RNA, 21 nt, synthetic construct
  source 1..21: mol_type = other RNA
agctcgcgccggtttttggag

SEQ ID NO: 13965 - RNA, 21 nt, synthetic construct
  source 1..21: mol_type = other RNA
agctgcaatcctgagggagct

SEQ ID NO: 13966 - RNA, 21 nt, synthetic construct
  source 1..21: mol_type = other RNA
agctgcggtggaggaggtgga

SEQ ID NO: 13967 - RNA, 21 nt, synthetic construct
  source 1..21: mol_type = other RNA
aggaggtggagagaaggccgc

SEQ ID NO: 13968 - RNA, 21 nt, synthetic construct
  source 1..21: mol_type = other RNA
aggattgcagctcgcgccggt

SEQ ID NO: 13969 - RNA, 21 nt, synthetic construct
  source 1..21: mol_type = other RNA
aggcgcttgttctccaaaaac

SEQ ID NO: 13970 - RNA, 21 nt, synthetic construct
  source 1..21: mol_type = other RNA
agggagctgcggtggaggagg

SEQ ID NO: 13971 - RNA, 21 nt, synthetic construct
  source 1..21: mol_type = other RNA
agggtgcggccttctctccac

SEQ ID NO: 13972 - RNA, 21 nt, synthetic construct
  source 1..21: mol_type = other RNA
aggtggagagaaggccgcacc

SEQ ID NO: 13973 - RNA, 21 nt, synthetic construct
  source 1..21: mol_type = other RNA
atcctgagggagctgcggtgg

SEQ ID NO: 13974 - RNA, 21 nt, synthetic construct
  source 1..21: mol_type = other RNA
attgcagctcgcgccggtttt

SEQ ID NO: 13975 - RNA, 21 nt, synthetic construct
  source 1..21: mol_type = other RNA
caaaaaccggcgcgagctgca

SEQ ID NO: 13976 - RNA, 21 nt, synthetic construct
  source 1..21: mol_type = other RNA
caatcctgagggagctgcggt

SEQ ID NO: 13977 - RNA, 21 nt, synthetic construct
  source 1..21: mol_type = other RNA
caccgcagctccctcaggatt

SEQ ID NO: 13978 - RNA, 21 nt, synthetic construct
  source 1..21: mol_type = other RNA
cacctcctccaccgcagctcc

SEQ ID NO: 13979 - RNA, 21 nt, synthetic construct
  source 1..21: mol_type = other RNA
cagaagggtgcggccttctct

SEQ ID NO: 13980 - RNA, 21 nt, synthetic construct
  source 1..21: mol_type = other RNA
cagctccctcaggattgcagc

SEQ ID NO: 13981 - RNA, 21 nt, synthetic construct
  source 1..21: mol_type = other RNA
cagctcgcgccggtttttgga

SEQ ID NO: 13982 - RNA, 21 nt, synthetic construct
  source 1..21: mol_type = other RNA
caggattgcagctcgcgccgg

SEQ ID NO: 13983 - RNA, 21 nt, synthetic construct
  source 1..21: mol_type = other RNA
ccaaaaaccggcgcgagctgc

SEQ ID NO: 13984 - RNA, 21 nt, synthetic construct
  source 1..21: mol_type = other RNA
ccaccgcagctccctcaggat

SEQ ID NO: 13985 - RNA, 21 nt, synthetic construct
  source 1..21: mol_type = other RNA
ccacctcctccaccgcagctc

SEQ ID NO: 13986 - RNA, 21 nt, synthetic construct
  source 1..21: mol_type = other RNA
ccagaagggtgcggccttctc

SEQ ID NO: 13987 - RNA, 21 nt, synthetic construct
  source 1..21: mol_type = other RNA
cccagaagggtgcggccttct

SEQ ID NO: 13988 - RNA, 21 nt, synthetic construct
  source 1..21: mol_type = other RNA
ccctcaggattgcagctcgcg

SEQ ID NO: 13989 - RNA, 21 nt, synthetic construct
  source 1..21: mol_type = other RNA
ccgcagctccctcaggattgc

SEQ ID NO: 13990 - RNA, 21 nt, synthetic construct
  source 1..21: mol_type = other RNA
ccggcgcgagctgcaatcctg

SEQ ID NO: 13991 - RNA, 21 nt, synthetic construct
  source 1..21: mol_type = other RNA
ccggtttttggagaacaagcg

SEQ ID NO: 13992 - RNA, 21 nt, synthetic construct
  source 1..21: mol_type = other RNA
cctcaggattgcagctcgcgc

SEQ ID NO: 13993 - RNA, 21 nt, synthetic construct
  source 1..21: mol_type = other RNA
cctccaccgcagctccctcag

SEQ ID NO: 13994 - RNA, 21 nt, synthetic construct
  source 1..21: mol_type = other RNA
cctcctccaccgcagctccct

SEQ ID NO: 13995 - RNA, 21 nt, synthetic construct
  source 1..21: mol_type = other RNA
cctgagggagctgcggtggag

SEQ ID NO: 13996 - RNA, 21 nt, synthetic construct
  source 1..21: mol_type = other RNA
ccttctctccacctcctccac

SEQ ID NO: 13997 - RNA, 21 nt, synthetic construct
  source 1..21: mol_type = other RNA
cgagctgcaatcctgagggag

SEQ ID NO: 13998 - RNA, 21 nt, synthetic construct
  source 1..21: mol_type = other RNA
cgcagctccctcaggattgca

SEQ ID NO: 13999 - RNA, 21 nt, synthetic construct
  source 1..21: mol_type = other RNA
cgccggtttttggagaacaag

SEQ ID NO: 14000 - RNA, 21 nt, synthetic construct
  source 1..21: mol_type = other RNA
cgcgagctgcaatcctgaggg

SEQ ID NO: 14001 - RNA, 21 nt, synthetic construct
  source 1..21: mol_type = other RNA
cgcgccggtttttggagaaca

SEQ ID NO: 14002 - RNA, 21 nt, synthetic construct
  source 1..21: mol_type = other RNA
cgcttgttctccaaaaaccgg

SEQ ID NO: 14003 - RNA, 21 nt, synthetic construct
  source 1..21: mol_type = other RNA
cggccttctctccacctcctc

SEQ ID NO: 14004 - RNA, 21 nt, synthetic construct
  source 1..21: mol_type = other RNA
cggcgcgagctgcaatcctga

SEQ ID NO: 14005 - RNA, 21 nt, synthetic construct
  source 1..21: mol_type = other RNA
cggtggaggaggtggagagaa

SEQ ID NO: 14006 - RNA, 21 nt, synthetic construct
  source 1..21: mol_type = other RNA
cggtttttggagaacaagcgc

SEQ ID NO: 14007 - RNA, 21 nt, synthetic construct
  source 1..21: mol_type = other RNA
ctcaggattgcagctcgcgcc

SEQ ID NO: 14008 - RNA, 21 nt, synthetic construct
  source 1..21: mol_type = other RNA
ctccaaaaaccggcgcgagct

SEQ ID NO: 14009 - RNA, 21 nt, synthetic construct
  source 1..21: mol_type = other RNA
ctccaccgcagctccctcagg

SEQ ID NO: 14010 - RNA, 21 nt, synthetic construct
  source 1..21: mol_type = other RNA
ctccacctcctccaccgcagc

SEQ ID NO: 14011 - RNA, 21 nt, synthetic construct
  source 1..21: mol_type = other RNA
ctccctcaggattgcagctcg

SEQ ID NO: 14012 - RNA, 21 nt, synthetic construct
  source 1..21: mol_type = other RNA
ctcctccaccgcagctccctc

SEQ ID NO: 14013 - RNA, 21 nt, synthetic construct
  source 1..21: mol_type = other RNA
ctcgcgccggtttttggagaa

SEQ ID NO: 14014 - RNA, 21 nt, synthetic construct
  source 1..21: mol_type = other RNA
ctctccacctcctccaccgca

SEQ ID NO: 14015 - RNA, 21 nt, synthetic construct
  source 1..21: mol_type = other RNA
ctgagggagctgcggtggagg

SEQ ID NO: 14016 - RNA, 21 nt, synthetic construct
  source 1..21: mol_type = other RNA
ctgcaatcctgagggagctgc

SEQ ID NO: 14017 - RNA, 21 nt, synthetic construct
  source 1..21: mol_type = other RNA
ctgcccagaagggtgcggcct

SEQ ID NO: 14018 - RNA, 21 nt, synthetic construct
  source 1..21: mol_type = other RNA
ctgcggtggaggaggtggaga

SEQ ID NO: 14019 - RNA, 21 nt, synthetic construct
  source 1..21: mol_type = other RNA
cttctctccacctcctccacc

SEQ ID NO: 14020 - RNA, 21 nt, synthetic construct
  source 1..21: mol_type = other RNA
cttgttctccaaaaaccggcg

SEQ ID NO: 14021 - RNA, 21 nt, synthetic construct
  source 1..21: mol_type = other RNA
gaagggtgcggccttctctcc

SEQ ID NO: 14022 - RNA, 21 nt, synthetic construct
  source 1..21: mol_type = other RNA
gagctgcaatcctgagggagc

SEQ ID NO: 14023 - RNA, 21 nt, synthetic construct
  source 1..21: mol_type = other RNA
gagctgcggtggaggaggtgg

SEQ ID NO: 14024 - RNA, 21 nt, synthetic construct
  source 1..21: mol_type = other RNA
gaggaggtggagagaaggccg

SEQ ID NO: 14025 - RNA, 21 nt, synthetic construct
  source 1..21: mol_type = other RNA
gaggcgcttgttctccaaaaa

SEQ ID NO: 14026 - RNA, 21 nt, synthetic construct
  source 1..21: mol_type = other RNA
gagggagctgcggtggaggag

SEQ ID NO: 14027 - RNA, 21 nt, synthetic construct
  source 1..21: mol_type = other RNA
gaggtggagagaaggccgcac

SEQ ID NO: 14028 - RNA, 21 nt, synthetic construct
  source 1..21: mol_type = other RNA
gattgcagctcgcgccggttt

SEQ ID NO: 14029 - RNA, 21 nt, synthetic construct
  source 1..21: mol_type = other RNA
gcaatcctgagggagctgcgg

SEQ ID NO: 14030 - RNA, 21 nt, synthetic construct
  source 1..21: mol_type = other RNA
gcagctccctcaggattgcag

SEQ ID NO: 14031 - RNA, 21 nt, synthetic construct
  source 1..21: mol_type = other RNA
gcagctcgcgccggtttttgg

SEQ ID NO: 14032 - RNA, 21 nt, synthetic construct
  source 1..21: mol_type = other RNA
gcccagaagggtgcggccttc

SEQ ID NO: 14033 - RNA, 21 nt, synthetic construct
  source 1..21: mol_type = other RNA
gccggtttttggagaacaagc

SEQ ID NO: 14034 - RNA, 21 nt, synthetic construct
  source 1..21: mol_type = other RNA
gccttctctccacctcctcca

SEQ ID NO: 14035 - RNA, 21 nt, synthetic construct
  source 1..21: mol_type = other RNA
gcgagctgcaatcctgaggga

SEQ ID NO: 14036 - RNA, 21 nt, synthetic construct
  source 1..21: mol_type = other RNA
gcgccggtttttggagaacaa

SEQ ID NO: 14037 - RNA, 21 nt, synthetic construct
  source 1..21: mol_type = other RNA
gcgcgagctgcaatcctgagg

SEQ ID NO: 14038 - RNA, 21 nt, synthetic construct
  source 1..21: mol_type = other RNA
gcgcttgttctccaaaaaccg

SEQ ID NO: 14039 - RNA, 21 nt, synthetic construct
  source 1..21: mol_type = other RNA
gcggccttctctccacctcct

SEQ ID NO: 14040 - RNA, 21 nt, synthetic construct
  source 1..21: mol_type = other RNA
gcggtggaggaggtggagaga

SEQ ID NO: 14041 - RNA, 21 nt, synthetic construct
  source 1..21: mol_type = other RNA
gctccctcaggattgcagctc

SEQ ID NO: 14042 - RNA, 21 nt, synthetic construct
  source 1..21: mol_type = other RNA
gctcgcgccggtttttggaga

SEQ ID NO: 14043 - RNA, 21 nt, synthetic construct
  source 1..21: mol_type = other RNA
gctgcaatcctgagggagctg

SEQ ID NO: 14044 - RNA, 21 nt, synthetic construct
  source 1..21: mol_type = other RNA
gctgcggtggaggaggtggag

SEQ ID NO: 14045 - RNA, 21 nt, synthetic construct
  source 1..21: mol_type = other RNA
gcttgttctccaaaaaccggc

SEQ ID NO: 14046 - RNA, 21 nt, synthetic construct
  source 1..21: mol_type = other RNA
ggagctgcggtggaggaggtg

SEQ ID NO: 14047 - RNA, 21 nt, synthetic construct
  source 1..21: mol_type = other RNA
ggaggaggtggagagaaggcc

SEQ ID NO: 14048 - RNA, 21 nt, synthetic construct
  source 1..21: mol_type = other RNA
ggaggcgcttgttctccaaaa

SEQ ID NO: 14049 - RNA, 21 nt, synthetic construct
  source 1..21: mol_type = other RNA
ggaggtggagagaaggccgca

SEQ ID NO: 14050 - RNA, 21 nt, synthetic construct
  source 1..21: mol_type = other RNA
ggattgcagctcgcgccggtt

SEQ ID NO: 14051 - RNA, 21 nt, synthetic construct
  source 1..21: mol_type = other RNA
ggccttctctccacctcctcc

SEQ ID NO: 14052 - RNA, 21 nt, synthetic construct
  source 1..21: mol_type = other RNA
ggcgcgagctgcaatcctgag

SEQ ID NO: 14053 - RNA, 21 nt, synthetic construct
  source 1..21: mol_type = other RNA
ggcgcttgttctccaaaaacc

SEQ ID NO: 14054 - RNA, 21 nt, synthetic construct
  source 1..21: mol_type = other RNA
gggagctgcggtggaggaggt

SEQ ID NO: 14055 - RNA, 21 nt, synthetic construct
  source 1..21: mol_type = other RNA
gggaggcgcttgttctccaaa

SEQ ID NO: 14056 - RNA, 21 nt, synthetic construct
  source 1..21: mol_type = other RNA
gggtgcggccttctctccacc

SEQ ID NO: 14057 - RNA, 21 nt, synthetic construct
  source 1..21: mol_type = other RNA
gggtgggaggcgcttgttctc

SEQ ID NO: 14058 - RNA, 21 nt, synthetic construct
  source 1..21: mol_type = other RNA
ggtgcggccttctctccacct

SEQ ID NO: 14059 - RNA, 21 nt, synthetic construct
  source 1..21: mol_type = other RNA
ggtggagagaaggccgcaccc

SEQ ID NO: 14060 - RNA, 21 nt, synthetic construct
  source 1..21: mol_type = other RNA
ggtggaggaggtggagagaag

SEQ ID NO: 14061 - RNA, 21 nt, synthetic construct
  source 1..21: mol_type = other RNA
ggtgggaggcgcttgttctcc

SEQ ID NO: 14062 - RNA, 21 nt, synthetic construct
  source 1..21: mol_type = other RNA
ggtttttggagaacaagcgcc

SEQ ID NO: 14063 - RNA, 21 nt, synthetic construct
  source 1..21: mol_type = other RNA
gtgcggccttctctccacctc

SEQ ID NO: 14064 - RNA, 21 nt, synthetic construct
  source 1..21: mol_type = other RNA
gtggagagaaggccgcaccct

SEQ ID NO: 14065 - RNA, 21 nt, synthetic construct
  source 1..21: mol_type = other RNA
gtggaggaggtggagagaagg

SEQ ID NO: 14066 - RNA, 21 nt, synthetic construct
  source 1..21: mol_type = other RNA
gtgggaggcgcttgttctcca

SEQ ID NO: 14067 - RNA, 21 nt, synthetic construct
  source 1..21: mol_type = other RNA
gtgggtgggaggcgcttgttc

SEQ ID NO: 14068 - RNA, 21 nt, synthetic construct
  source 1..21: mol_type = other RNA
gttctccaaaaaccggcgcga

SEQ ID NO: 14069 - RNA, 21 nt, synthetic construct
  source 1..21: mol_type = other RNA
gtttttggagaacaagcgcct

SEQ ID NO: 14070 - RNA, 21 nt, synthetic construct
  source 1..21: mol_type = other RNA
tcaggattgcagctcgcgccg

SEQ ID NO: 14071 - RNA, 21 nt, synthetic construct
  source 1..21: mol_type = other RNA
tccaaaaaccggcgcgagctg

SEQ ID NO: 14072 - RNA, 21 nt, synthetic construct
  source 1..21: mol_type = other RNA
tccaccgcagctccctcagga

SEQ ID NO: 14073 - RNA, 21 nt, synthetic construct
  source 1..21: mol_type = other RNA
tccacctcctccaccgcagct

SEQ ID NO: 14074 - RNA, 21 nt, synthetic construct
  source 1..21: mol_type = other RNA
tccctcaggattgcagctcgc

SEQ ID NO: 14075 - RNA, 21 nt, synthetic construct
  source 1..21: mol_type = other RNA
tcctccaccgcagctccctca

SEQ ID NO: 14076 - RNA, 21 nt, synthetic construct
  source 1..21: mol_type = other RNA
tcctgagggagctgcggtgga

SEQ ID NO: 14077 - RNA, 21 nt, synthetic construct
  source 1..21: mol_type = other RNA
tcgcgccggtttttggagaac

SEQ ID NO: 14078 - RNA, 21 nt, synthetic construct
  source 1..21: mol_type = other RNA
tctccaaaaaccggcgcgagc

SEQ ID NO: 14079 - RNA, 21 nt, synthetic construct
  source 1..21: mol_type = other RNA
tctccacctcctccaccgcag

SEQ ID NO: 14080 - RNA, 21 nt, synthetic construct
  source 1..21: mol_type = other RNA
tctctccacctcctccaccgc

SEQ ID NO: 14081 - RNA, 21 nt, synthetic construct
  source 1..21: mol_type = other RNA
tgagggagctgcggtggagga

SEQ ID NO: 14082 - RNA, 21 nt, synthetic construct
  source 1..21: mol_type = other RNA
tgcaatcctgagggagctgcg

SEQ ID NO: 14083 - RNA, 21 nt, synthetic construct
  source 1..21: mol_type = other RNA
tgcagctcgcgccggtttttg

SEQ ID NO: 14084 - RNA, 21 nt, synthetic construct
  source 1..21: mol_type = other RNA
tgcccagaagggtgcggcctt

SEQ ID NO: 14085 - RNA, 21 nt, synthetic construct
  source 1..21: mol_type = other RNA
tgcggccttctctccacctcc

SEQ ID NO: 14086 - RNA, 21 nt, synthetic construct
  source 1..21: mol_type = other RNA
tgcggtggaggaggtggagag

SEQ ID NO: 14087 - RNA, 21 nt, synthetic construct
  source 1..21: mol_type = other RNA
tggagagaaggccgcaccctt

SEQ ID NO: 14088 - RNA, 21 nt, synthetic construct
  source 1..21: mol_type = other RNA
tggaggaggtggagagaaggc

SEQ ID NO: 14089 - RNA, 21 nt, synthetic construct
  source 1..21: mol_type = other RNA
tgggaggcgcttgttctccaa

SEQ ID NO: 14090 - RNA, 21 nt, synthetic construct
  source 1..21: mol_type = other RNA
tgggtgggaggcgcttgttct

SEQ ID NO: 14091 - RNA, 21 nt, synthetic construct
  source 1..21: mol_type = other RNA
tgttctccaaaaaccggcgcg

SEQ ID NO: 14092 - RNA, 21 nt, synthetic construct
  source 1..21: mol_type = other RNA
ttctccaaaaaccggcgcgag

SEQ ID NO: 14093 - RNA, 21 nt, synthetic construct
  source 1..21: mol_type = other RNA
ttctctccacctcctccaccg

SEQ ID NO: 14094 - RNA, 21 nt, synthetic construct
  source 1..21: mol_type = other RNA
ttgcagctcgcgccggttttt

SEQ ID NO: 14095 - RNA, 21 nt, synthetic construct
  source 1..21: mol_type = other RNA
ttgttctccaaaaaccggcgc

SEQ ID NO: 14096 - RNA, 21 nt, synthetic construct
  source 1..21: mol_type = other RNA
tttttggagaacaagcgcctc

SEQ ID NO: 14097 - RNA, 22 nt, synthetic construct
  source 1..22: mol_type = other RNA
aaaaaccggcgcgagctgcaat

SEQ ID NO: 14098 - RNA, 22 nt, synthetic construct
  source 1..22: mol_type = other RNA
aaaaccggcgcgagctgcaatc

SEQ ID NO: 14099 - RNA, 22 nt, synthetic construct
  source 1..22: mol_type = other RNA
aaaccggcgcgagctgcaatcc

SEQ ID NO: 14100 - RNA, 22 nt, synthetic construct
  source 1..22: mol_type = other RNA
aaccggcgcgagctgcaatcct

SEQ ID NO: 14101 - RNA, 22 nt, synthetic construct
  source 1..22: mol_type = other RNA
aagggtgcggccttctctccac

SEQ ID NO: 14102 - RNA, 22 nt, synthetic construct
  source 1..22: mol_type = other RNA
aatcctgagggagctgcggtgg

SEQ ID NO: 14103 - RNA, 22 nt, synthetic construct
  source 1..22: mol_type = other RNA
accgcagctccctcaggattgc

SEQ ID NO: 14104 - RNA, 22 nt, synthetic construct
  source 1..22: mol_type = other RNA
accggcgcgagctgcaatcctg

SEQ ID NO: 14105 - RNA, 22 nt, synthetic construct
  source 1..22: mol_type = other RNA
acctcctccaccgcagctccct

SEQ ID NO: 14106 - RNA, 22 nt, synthetic construct
  source 1..22: mol_type = other RNA
agaagggtgcggccttctctcc

SEQ ID NO: 14107 - RNA, 22 nt, synthetic construct
  source 1..22: mol_type = other RNA
agctccctcaggattgcagctc

SEQ ID NO: 14108 - RNA, 22 nt, synthetic construct
  source 1..22: mol_type = other RNA
agctcgcgccggtttttggaga

SEQ ID NO: 14109 - RNA, 22 nt, synthetic construct
  source 1..22: mol_type = other RNA
agctgcaatcctgagggagctg

SEQ ID NO: 14110 - RNA, 22 nt, synthetic construct
  source 1..22: mol_type = other RNA
agctgcggtggaggaggtggag

SEQ ID NO: 14111 - RNA, 22 nt, synthetic construct
  source 1..22: mol_type = other RNA
aggaggtggagagaaggccgca

SEQ ID NO: 14112 - RNA, 22 nt, synthetic construct
  source 1..22: mol_type = other RNA
aggattgcagctcgcgccggtt

SEQ ID NO: 14113 - RNA, 22 nt, synthetic construct
  source 1..22: mol_type = other RNA
aggcgcttgttctccaaaaacc

SEQ ID NO: 14114 - RNA, 22 nt, synthetic construct
  source 1..22: mol_type = other RNA
agggagctgcggtggaggaggt

SEQ ID NO: 14115 - RNA, 22 nt, synthetic construct
  source 1..22: mol_type = other RNA
agggtgcggccttctctccacc

SEQ ID NO: 14116 - RNA, 22 nt, synthetic construct
  source 1..22: mol_type = other RNA
aggtggagagaaggccgcaccc

SEQ ID NO: 14117 - RNA, 22 nt, synthetic construct
  source 1..22: mol_type = other RNA
atcctgagggagctgcggtgga

SEQ ID NO: 14118 - RNA, 22 nt, synthetic construct
  source 1..22: mol_type = other RNA
attgcagctcgcgccggttttt

SEQ ID NO: 14119 - RNA, 22 nt, synthetic construct
  source 1..22: mol_type = other RNA
caaaaaccggcgcgagctgcaa

SEQ ID NO: 14120 - RNA, 22 nt, synthetic construct
  source 1..22: mol_type = other RNA
caatcctgagggagctgcggtg

SEQ ID NO: 14121 - RNA, 22 nt, synthetic construct
  source 1..22: mol_type = other RNA
caccgcagctccctcaggattg

SEQ ID NO: 14122 - RNA, 22 nt, synthetic construct
  source 1..22: mol_type = other RNA
cacctcctccaccgcagctccc

SEQ ID NO: 14123 - RNA, 22 nt, synthetic construct
  source 1..22: mol_type = other RNA
cagaagggtgcggccttctctc

SEQ ID NO: 14124 - RNA, 22 nt, synthetic construct
  source 1..22: mol_type = other RNA
cagctccctcaggattgcagct

SEQ ID NO: 14125 - RNA, 22 nt, synthetic construct
  source 1..22: mol_type = other RNA
cagctcgcgccggtttttggag

SEQ ID NO: 14126 - RNA, 22 nt, synthetic construct
  source 1..22: mol_type = other RNA
caggattgcagctcgcgccggt

SEQ ID NO: 14127 - RNA, 22 nt, synthetic construct
  source 1..22: mol_type = other RNA
ccaaaaaccggcgcgagctgca

SEQ ID NO: 14128 - RNA, 22 nt, synthetic construct
  source 1..22: mol_type = other RNA
ccaccgcagctccctcaggatt

SEQ ID NO: 14129 - RNA, 22 nt, synthetic construct
  source 1..22: mol_type = other RNA
ccacctcctccaccgcagctcc

SEQ ID NO: 14130 - RNA, 22 nt, synthetic construct
  source 1..22: mol_type = other RNA
ccagaagggtgcggccttctct

SEQ ID NO: 14131 - RNA, 22 nt, synthetic construct
  source 1..22: mol_type = other RNA
cccagaagggtgcggccttctc

SEQ ID NO: 14132 - RNA, 22 nt, synthetic construct
  source 1..22: mol_type = other RNA
ccctcaggattgcagctcgcgc

SEQ ID NO: 14133 - RNA, 22 nt, synthetic construct
  source 1..22: mol_type = other RNA
ccgcagctccctcaggattgca

SEQ ID NO: 14134 - RNA, 22 nt, synthetic construct
  source 1..22: mol_type = other RNA
ccggcgcgagctgcaatcctga

SEQ ID NO: 14135 - RNA, 22 nt, synthetic construct
  source 1..22: mol_type = other RNA
ccggtttttggagaacaagcgc

SEQ ID NO: 14136 - RNA, 22 nt, synthetic construct
  source 1..22: mol_type = other RNA
cctcaggattgcagctcgcgcc

SEQ ID NO: 14137 - RNA, 22 nt, synthetic construct
  source 1..22: mol_type = other RNA
cctccaccgcagctccctcagg

SEQ ID NO: 14138 - RNA, 22 nt, synthetic construct
  source 1..22: mol_type = other RNA
cctcctccaccgcagctccctc

SEQ ID NO: 14139 - RNA, 22 nt, synthetic construct
  source 1..22: mol_type = other RNA
cctgagggagctgcggtggagg

SEQ ID NO: 14140 - RNA, 22 nt, synthetic construct
  source 1..22: mol_type = other RNA
ccttctctccacctcctccacc

SEQ ID NO: 14141 - RNA, 22 nt, synthetic construct
  source 1..22: mol_type = other RNA
cgagctgcaatcctgagggagc

SEQ ID NO: 14142 - RNA, 22 nt, synthetic construct
  source 1..22: mol_type = other RNA
cgcagctccctcaggattgcag

SEQ ID NO: 14143 - RNA, 22 nt, synthetic construct
  source 1..22: mol_type = other RNA
cgccggtttttggagaacaagc

SEQ ID NO: 14144 - RNA, 22 nt, synthetic construct
  source 1..22: mol_type = other RNA
cgcgagctgcaatcctgaggga

SEQ ID NO: 14145 - RNA, 22 nt, synthetic construct
  source 1..22: mol_type = other RNA
cgcgccggtttttggagaacaa

SEQ ID NO: 14146 - RNA, 22 nt, synthetic construct
  source 1..22: mol_type = other RNA
cgcttgttctccaaaaaccggc

SEQ ID NO: 14147 - RNA, 22 nt, synthetic construct
  source 1..22: mol_type = other RNA
cggccttctctccacctcctcc

SEQ ID NO: 14148 - RNA, 22 nt, synthetic construct
  source 1..22: mol_type = other RNA
cggcgcgagctgcaatcctgag

SEQ ID NO: 14149 - RNA, 22 nt, synthetic construct
  source 1..22: mol_type = other RNA
cggtggaggaggtggagagaag

SEQ ID NO: 14150 - RNA, 22 nt, synthetic construct
  source 1..22: mol_type = other RNA
cggtttttggagaacaagcgcc

SEQ ID NO: 14151 - RNA, 22 nt, synthetic construct
  source 1..22: mol_type = other RNA
ctcaggattgcagctcgcgccg

SEQ ID NO: 14152 - RNA, 22 nt, synthetic construct
  source 1..22: mol_type = other RNA
ctccaaaaaccggcgcgagctg

SEQ ID NO: 14153 - RNA, 22 nt, synthetic construct
  source 1..22: mol_type = other RNA
ctccaccgcagctccctcagga

SEQ ID NO: 14154 - RNA, 22 nt, synthetic construct
  source 1..22: mol_type = other RNA
ctccacctcctccaccgcagct

SEQ ID NO: 14155 - RNA, 22 nt, synthetic construct
  source 1..22: mol_type = other RNA
ctccctcaggattgcagctcgc

SEQ ID NO: 14156 - RNA, 22 nt, synthetic construct
  source 1..22: mol_type = other RNA
ctcctccaccgcagctccctca

SEQ ID NO: 14157 - RNA, 22 nt, synthetic construct
  source 1..22: mol_type = other RNA
ctcgcgccggtttttggagaac

SEQ ID NO: 14158 - RNA, 22 nt, synthetic construct
  source 1..22: mol_type = other RNA
ctctccacctcctccaccgcag

SEQ ID NO: 14159 - RNA, 22 nt, synthetic construct
  source 1..22: mol_type = other RNA
ctgagggagctgcggtggagga

SEQ ID NO: 14160 - RNA, 22 nt, synthetic construct
  source 1..22: mol_type = other RNA
ctgcaatcctgagggagctgcg

SEQ ID NO: 14161 - RNA, 22 nt, synthetic construct
  source 1..22: mol_type = other RNA
ctgcccagaagggtgcggcctt

SEQ ID NO: 14162 - RNA, 22 nt, synthetic construct
  source 1..22: mol_type = other RNA
ctgcggtggaggaggtggagag

SEQ ID NO: 14163 - RNA, 22 nt, synthetic construct
  source 1..22: mol_type = other RNA
cttctctccacctcctccaccg

SEQ ID NO: 14164 - RNA, 22 nt, synthetic construct
  source 1..22: mol_type = other RNA
cttgttctccaaaaaccggcgc

SEQ ID NO: 14165 - RNA, 22 nt, synthetic construct
  source 1..22: mol_type = other RNA
gaagggtgcggccttctctcca

SEQ ID NO: 14166 - RNA, 22 nt, synthetic construct
  source 1..22: mol_type = other RNA
gagctgcaatcctgagggagct

SEQ ID NO: 14167 - RNA, 22 nt, synthetic construct
  source 1..22: mol_type = other RNA
gagctgcggtggaggaggtgga

SEQ ID NO: 14168 - RNA, 22 nt, synthetic construct
  source 1..22: mol_type = other RNA
gaggaggtggagagaaggccgc

SEQ ID NO: 14169 - RNA, 22 nt, synthetic construct
  source 1..22: mol_type = other RNA
gaggcgcttgttctccaaaaac

SEQ ID NO: 14170 - RNA, 22 nt, synthetic construct
  source 1..22: mol_type = other RNA
gagggagctgcggtggaggagg

SEQ ID NO: 14171 - RNA, 22 nt, synthetic construct
  source 1..22: mol_type = other RNA
gaggtggagagaaggccgcacc

SEQ ID NO: 14172 - RNA, 22 nt, synthetic construct
  source 1..22: mol_type = other RNA
gattgcagctcgcgccggtttt

SEQ ID NO: 14173 - RNA, 22 nt, synthetic construct
  source 1..22: mol_type = other RNA
gcaatcctgagggagctgcggt

SEQ ID NO: 14174 - RNA, 22 nt, synthetic construct
  source 1..22: mol_type = other RNA
gcagctccctcaggattgcagc

SEQ ID NO: 14175 - RNA, 22 nt, synthetic construct
  source 1..22: mol_type = other RNA
gcagctcgcgccggtttttgga

SEQ ID NO: 14176 - RNA, 22 nt, synthetic construct
  source 1..22: mol_type = other RNA
gcccagaagggtgcggccttct

SEQ ID NO: 14177 - RNA, 22 nt, synthetic construct
  source 1..22: mol_type = other RNA
gccggtttttggagaacaagcg

SEQ ID NO: 14178 - RNA, 22 nt, synthetic construct
  source 1..22: mol_type = other RNA
gccttctctccacctcctccac

SEQ ID NO: 14179 - RNA, 22 nt, synthetic construct
  source 1..22: mol_type = other RNA
gcgagctgcaatcctgagggag

SEQ ID NO: 14180 - RNA, 22 nt, synthetic construct
  source 1..22: mol_type = other RNA
gcgccggtttttggagaacaag

SEQ ID NO: 14181 - RNA, 22 nt, synthetic construct
  source 1..22: mol_type = other RNA
gcgcgagctgcaatcctgaggg

SEQ ID NO: 14182 - RNA, 22 nt, synthetic construct
  source 1..22: mol_type = other RNA
gcgcttgttctccaaaaaccgg

SEQ ID NO: 14183 - RNA, 22 nt, synthetic construct
  source 1..22: mol_type = other RNA
gcggccttctctccacctcctc

SEQ ID NO: 14184 - RNA, 22 nt, synthetic construct
  source 1..22: mol_type = other RNA
gcggtggaggaggtggagagaa

SEQ ID NO: 14185 - RNA, 22 nt, synthetic construct
  source 1..22: mol_type = other RNA
gctccctcaggattgcagctcg

SEQ ID NO: 14186 - RNA, 22 nt, synthetic construct
  source 1..22: mol_type = other RNA
gctcgcgccggtttttggagaa

SEQ ID NO: 14187 - RNA, 22 nt, synthetic construct
  source 1..22: mol_type = other RNA
gctgcaatcctgagggagctgc

SEQ ID NO: 14188 - RNA, 22 nt, synthetic construct
  source 1..22: mol_type = other RNA
gctgcggtggaggaggtggaga

SEQ ID NO: 14189 - RNA, 22 nt, synthetic construct
  source 1..22: mol_type = other RNA
gcttgttctccaaaaaccggcg

SEQ ID NO: 14190 - RNA, 22 nt, synthetic construct
  source 1..22: mol_type = other RNA
ggagctgcggtggaggaggtgg

SEQ ID NO: 14191 - RNA, 22 nt, synthetic construct
  source 1..22: mol_type = other RNA
ggaggaggtggagagaaggccg

SEQ ID NO: 14192 - RNA, 22 nt, synthetic construct
  source 1..22: mol_type = other RNA
ggaggcgcttgttctccaaaaa

SEQ ID NO: 14193 - RNA, 22 nt, synthetic construct
  source 1..22: mol_type = other RNA
ggaggtggagagaaggccgcac

SEQ ID NO: 14194 - RNA, 22 nt, synthetic construct
  source 1..22: mol_type = other RNA
ggattgcagctcgcgccggttt

SEQ ID NO: 14195 - RNA, 22 nt, synthetic construct
  source 1..22: mol_type = other RNA
ggccttctctccacctcctcca

SEQ ID NO: 14196 - RNA, 22 nt, synthetic construct
  source 1..22: mol_type = other RNA
ggcgcgagctgcaatcctgagg

SEQ ID NO: 14197 - RNA, 22 nt, synthetic construct
  source 1..22: mol_type = other RNA
ggcgcttgttctccaaaaaccg

SEQ ID NO: 14198 - RNA, 22 nt, synthetic construct
  source 1..22: mol_type = other RNA
gggagctgcggtggaggaggtg

SEQ ID NO: 14199 - RNA, 22 nt, synthetic construct
  source 1..22: mol_type = other RNA
gggaggcgcttgttctccaaaa

SEQ ID NO: 14200 - RNA, 22 nt, synthetic construct
  source 1..22: mol_type = other RNA
gggtgcggccttctctccacct

SEQ ID NO: 14201 - RNA, 22 nt, synthetic construct
  source 1..22: mol_type = other RNA
gggtgggaggcgcttgttctcc

SEQ ID NO: 14202 - RNA, 22 nt, synthetic construct
  source 1..22: mol_type = other RNA
ggtgcggccttctctccacctc

SEQ ID NO: 14203 - RNA, 22 nt, synthetic construct
  source 1..22: mol_type = other RNA
ggtggagagaaggccgcaccct

SEQ ID NO: 14204 - RNA, 22 nt, synthetic construct
  source 1..22: mol_type = other RNA
ggtggaggaggtggagagaagg

SEQ ID NO: 14205 - RNA, 22 nt, synthetic construct
  source 1..22: mol_type = other RNA
ggtgggaggcgcttgttctcca

SEQ ID NO: 14206 - RNA, 22 nt, synthetic construct
  source 1..22: mol_type = other RNA
ggtttttggagaacaagcgcct

SEQ ID NO: 14207 - RNA, 22 nt, synthetic construct
  source 1..22: mol_type = other RNA
gtgcggccttctctccacctcc

SEQ ID NO: 14208 - RNA, 22 nt, synthetic construct
  source 1..22: mol_type = other RNA
gtggagagaaggccgcaccctt

SEQ ID NO: 14209 - RNA, 22 nt, synthetic construct
  source 1..22: mol_type = other RNA
gtggaggaggtggagagaaggc

SEQ ID NO: 14210 - RNA, 22 nt, synthetic construct
  source 1..22: mol_type = other RNA
gtgggaggcgcttgttctccaa

SEQ ID NO: 14211 - RNA, 22 nt, synthetic construct
  source 1..22: mol_type = other RNA
gtgggtgggaggcgcttgttct

SEQ ID NO: 14212 - RNA, 22 nt, synthetic construct
  source 1..22: mol_type = other RNA
gttctccaaaaaccggcgcgag

SEQ ID NO: 14213 - RNA, 22 nt, synthetic construct
  source 1..22: mol_type = other RNA
gtttttggagaacaagcgcctc

SEQ ID NO: 14214 - RNA, 22 nt, synthetic construct
  source 1..22: mol_type = other RNA
tcaggattgcagctcgcgccgg

SEQ ID NO: 14215 - RNA, 22 nt, synthetic construct
  source 1..22: mol_type = other RNA
tccaaaaaccggcgcgagctgc

SEQ ID NO: 14216 - RNA, 22 nt, synthetic construct
  source 1..22: mol_type = other RNA
tccaccgcagctccctcaggat

SEQ ID NO: 14217 - RNA, 22 nt, synthetic construct
  source 1..22: mol_type = other RNA
tccacctcctccaccgcagctc

SEQ ID NO: 14218 - RNA, 22 nt, synthetic construct
  source 1..22: mol_type = other RNA
tccctcaggattgcagctcgcg

SEQ ID NO: 14219 - RNA, 22 nt, synthetic construct
  source 1..22: mol_type = other RNA
tcctccaccgcagctccctcag

SEQ ID NO: 14220 - RNA, 22 nt, synthetic construct
  source 1..22: mol_type = other RNA
tcctgagggagctgcggtggag

SEQ ID NO: 14221 - RNA, 22 nt, synthetic construct
  source 1..22: mol_type = other RNA
tcgcgccggtttttggagaaca

SEQ ID NO: 14222 - RNA, 22 nt, synthetic construct
  source 1..22: mol_type = other RNA
tctccaaaaaccggcgcgagct

SEQ ID NO: 14223 - RNA, 22 nt, synthetic construct
  source 1..22: mol_type = other RNA
tctccacctcctccaccgcagc

SEQ ID NO: 14224 - RNA, 22 nt, synthetic construct
  source 1..22: mol_type = other RNA
tctctccacctcctccaccgca

SEQ ID NO: 14225 - RNA, 22 nt, synthetic construct
  source 1..22: mol_type = other RNA
tgagggagctgcggtggaggag

SEQ ID NO: 14226 - RNA, 22 nt, synthetic construct
  source 1..22: mol_type = other RNA
tgcaatcctgagggagctgcgg

SEQ ID NO: 14227 - RNA, 22 nt, synthetic construct
  source 1..22: mol_type = other RNA
tgcagctcgcgccggtttttgg

SEQ ID NO: 14228 - RNA, 22 nt, synthetic construct
  source 1..22: mol_type = other RNA
tgcccagaagggtgcggccttc

SEQ ID NO: 14229 - RNA, 22 nt, synthetic construct
  source 1..22: mol_type = other RNA
tgcggccttctctccacctcct

SEQ ID NO: 14230 - RNA, 22 nt, synthetic construct
  source 1..22: mol_type = other RNA
tgcggtggaggaggtggagaga

SEQ ID NO: 14231 - RNA, 22 nt, synthetic construct
  source 1..22: mol_type = other RNA
tggaggaggtggagagaaggcc

SEQ ID NO: 14232 - RNA, 22 nt, synthetic construct
  source 1..22: mol_type = other RNA
tgggaggcgcttgttctccaaa

SEQ ID NO: 14233 - RNA, 22 nt, synthetic construct
  source 1..22: mol_type = other RNA
tgggtgggaggcgcttgttctc

SEQ ID NO: 14234 - RNA, 22 nt, synthetic construct
  source 1..22: mol_type = other RNA
tgttctccaaaaaccggcgcga

SEQ ID NO: 14235 - RNA, 22 nt, synthetic construct
  source 1..22: mol_type = other RNA
ttctccaaaaaccggcgcgagc

SEQ ID NO: 14236 - RNA, 22 nt, synthetic construct
  source 1..22: mol_type = other RNA
ttctctccacctcctccaccgc

SEQ ID NO: 14237 - RNA, 22 nt, synthetic construct
  source 1..22: mol_type = other RNA
ttgcagctcgcgccggtttttg

SEQ ID NO: 14238 - RNA, 22 nt, synthetic construct
  source 1..22: mol_type = other RNA
ttgttctccaaaaaccggcgcg

SEQ ID NO: 14239 - RNA, 20 nt, synthetic construct
  source 1..20: mol_type = other RNA
aaaatcagccccaggtgaat

SEQ ID NO: 14240 - RNA, 20 nt, synthetic construct
  source 1..20: mol_type = other RNA
aaatcagccccaggtgaatg

SEQ ID NO: 14241 - RNA, 20 nt, synthetic construct
  source 1..20: mol_type = other RNA
aaatggagcttagtcattca

SEQ ID NO: 14242 - RNA, 20 nt, synthetic construct
  source 1..20: mol_type = other RNA
aacctcgacaccaactctag

SEQ ID NO: 14243 - RNA, 20 nt, synthetic construct
  source 1..20: mol_type = other RNA
aactctagtccgtgggaaga

SEQ ID NO: 14244 - RNA, 20 nt, synthetic construct
  source 1..20: mol_type = other RNA
aagctccatttccctacccc

SEQ ID NO: 14245 - RNA, 20 nt, synthetic construct
  source 1..20: mol_type = other RNA
aagggtggggtagggaaatg

SEQ ID NO: 14246 - RNA, 20 nt, synthetic construct
  source 1..20: mol_type = other RNA
aataacctcgacaccaactc

SEQ ID NO: 14247 - RNA, 20 nt, synthetic construct
  source 1..20: mol_type = other RNA
aataagggtggggtagggaa

SEQ ID NO: 14248 - RNA, 20 nt, synthetic construct
  source 1..20: mol_type = other RNA
aatcagccccaggtgaatga

SEQ ID NO: 14249 - RNA, 20 nt, synthetic construct
  source 1..20: mol_type = other RNA
aatgactaagctccatttcc

SEQ ID NO: 14250 - RNA, 20 nt, synthetic construct
  source 1..20: mol_type = other RNA
aatggagcttagtcattcac

SEQ ID NO: 14251 - RNA, 20 nt, synthetic construct
  source 1..20: mol_type = other RNA
acaataacctcgacaccaac

SEQ ID NO: 14252 - RNA, 20 nt, synthetic construct
  source 1..20: mol_type = other RNA
acaccaactctagtccgtgg

SEQ ID NO: 14253 - RNA, 20 nt, synthetic construct
  source 1..20: mol_type = other RNA
accaactctagtccgtggga

SEQ ID NO: 14254 - RNA, 20 nt, synthetic construct
  source 1..20: mol_type = other RNA
accccacccttattacaata

SEQ ID NO: 14255 - RNA, 20 nt, synthetic construct
  source 1..20: mol_type = other RNA
acccttattacaataacctc

SEQ ID NO: 14256 - RNA, 20 nt, synthetic construct
  source 1..20: mol_type = other RNA
acctcgacaccaactctagt

SEQ ID NO: 14257 - RNA, 20 nt, synthetic construct
  source 1..20: mol_type = other RNA
acggactagagttggtgtcg

SEQ ID NO: 14258 - RNA, 20 nt, synthetic construct
  source 1..20: mol_type = other RNA
actaagctccatttccctac

SEQ ID NO: 14259 - RNA, 20 nt, synthetic construct
  source 1..20: mol_type = other RNA
actagagttggtgtcgaggt

SEQ ID NO: 14260 - RNA, 20 nt, synthetic construct
  source 1..20: mol_type = other RNA
actctagtccgtgggaagat

SEQ ID NO: 14261 - RNA, 20 nt, synthetic construct
  source 1..20: mol_type = other RNA
agagttggtgtcgaggttat

SEQ ID NO: 14262 - RNA, 20 nt, synthetic construct
  source 1..20: mol_type = other RNA
agccccaggtgaatgactaa

SEQ ID NO: 14263 - RNA, 20 nt, synthetic construct
  source 1..20: mol_type = other RNA
agctccatttccctacccca

SEQ ID NO: 14264 - RNA, 20 nt, synthetic construct
  source 1..20: mol_type = other RNA
agcttagtcattcacctggg

SEQ ID NO: 14265 - RNA, 20 nt, synthetic construct
  source 1..20: mol_type = other RNA
agggaaatggagcttagtca

SEQ ID NO: 14266 - RNA, 20 nt, synthetic construct
  source 1..20: mol_type = other RNA
agggtggggtagggaaatgg

SEQ ID NO: 14267 - RNA, 20 nt, synthetic construct
  source 1..20: mol_type = other RNA
aggtgaatgactaagctcca

SEQ ID NO: 14268 - RNA, 20 nt, synthetic construct
  source 1..20: mol_type = other RNA
aggttattgtaataagggtg

SEQ ID NO: 14269 - RNA, 20 nt, synthetic construct
  source 1..20: mol_type = other RNA
agttggtgtcgaggttattg

SEQ ID NO: 14270 - RNA, 20 nt, synthetic construct
  source 1..20: mol_type = other RNA
agtttatcttcccacggact

SEQ ID NO: 14271 - RNA, 20 nt, synthetic construct
  source 1..20: mol_type = other RNA
ataacctcgacaccaactct

SEQ ID NO: 14272 - RNA, 20 nt, synthetic construct
  source 1..20: mol_type = other RNA
ataagggtggggtagggaaa

SEQ ID NO: 14273 - RNA, 20 nt, synthetic construct
  source 1..20: mol_type = other RNA
atcagccccaggtgaatgac

SEQ ID NO: 14274 - RNA, 20 nt, synthetic construct
  source 1..20: mol_type = other RNA
atcttcccacggactagagt

SEQ ID NO: 14275 - RNA, 20 nt, synthetic construct
  source 1..20: mol_type = other RNA
atgactaagctccatttccc

SEQ ID NO: 14276 - RNA, 20 nt, synthetic construct
  source 1..20: mol_type = other RNA
atggagcttagtcattcacc

SEQ ID NO: 14277 - RNA, 20 nt, synthetic construct
  source 1..20: mol_type = other RNA
attacaataacctcgacacc

SEQ ID NO: 14278 - RNA, 20 nt, synthetic construct
  source 1..20: mol_type = other RNA
attagtttatcttcccacgg

SEQ ID NO: 14279 - RNA, 20 nt, synthetic construct
  source 1..20: mol_type = other RNA
attgtaataagggtggggta

SEQ ID NO: 14280 - RNA, 20 nt, synthetic construct
  source 1..20: mol_type = other RNA
atttccctaccccaccctta

SEQ ID NO: 14281 - RNA, 20 nt, synthetic construct
  source 1..20: mol_type = other RNA
caactctagtccgtgggaag

SEQ ID NO: 14282 - RNA, 20 nt, synthetic construct
  source 1..20: mol_type = other RNA
caataacctcgacaccaact

SEQ ID NO: 14283 - RNA, 20 nt, synthetic construct
  source 1..20: mol_type = other RNA
caccaactctagtccgtggg

SEQ ID NO: 14284 - RNA, 20 nt, synthetic construct
  source 1..20: mol_type = other RNA
cacccttattacaataacct

SEQ ID NO: 14285 - RNA, 20 nt, synthetic construct
  source 1..20: mol_type = other RNA
cacggactagagttggtgtc

SEQ ID NO: 14286 - RNA, 20 nt, synthetic construct
  source 1..20: mol_type = other RNA
cagccccaggtgaatgacta

SEQ ID NO: 14287 - RNA, 20 nt, synthetic construct
  source 1..20: mol_type = other RNA
caggtgaatgactaagctcc

SEQ ID NO: 14288 - RNA, 20 nt, synthetic construct
  source 1..20: mol_type = other RNA
catttccctaccccaccctt

SEQ ID NO: 14289 - RNA, 20 nt, synthetic construct
  source 1..20: mol_type = other RNA
ccaactctagtccgtgggaa

SEQ ID NO: 14290 - RNA, 20 nt, synthetic construct
  source 1..20: mol_type = other RNA
ccacccttattacaataacc

SEQ ID NO: 14291 - RNA, 20 nt, synthetic construct
  source 1..20: mol_type = other RNA
ccacggactagagttggtgt

SEQ ID NO: 14292 - RNA, 20 nt, synthetic construct
  source 1..20: mol_type = other RNA
ccaggtgaatgactaagctc

SEQ ID NO: 14293 - RNA, 20 nt, synthetic construct
  source 1..20: mol_type = other RNA
ccatttccctaccccaccct

SEQ ID NO: 14294 - RNA, 20 nt, synthetic construct
  source 1..20: mol_type = other RNA
cccacccttattacaataac

SEQ ID NO: 14295 - RNA, 20 nt, synthetic construct
  source 1..20: mol_type = other RNA
cccacggactagagttggtg

SEQ ID NO: 14296 - RNA, 20 nt, synthetic construct
  source 1..20: mol_type = other RNA
cccaggtgaatgactaagct

SEQ ID NO: 14297 - RNA, 20 nt, synthetic construct
  source 1..20: mol_type = other RNA
ccccacccttattacaataa

SEQ ID NO: 14298 - RNA, 20 nt, synthetic construct
  source 1..20: mol_type = other RNA
ccccaggtgaatgactaagc

SEQ ID NO: 14299 - RNA, 20 nt, synthetic construct
  source 1..20: mol_type = other RNA
ccctaccccacccttattac

SEQ ID NO: 14300 - RNA, 20 nt, synthetic construct
  source 1..20: mol_type = other RNA
cccttattacaataacctcg

SEQ ID NO: 14301 - RNA, 20 nt, synthetic construct
  source 1..20: mol_type = other RNA
cctaccccacccttattaca

SEQ ID NO: 14302 - RNA, 20 nt, synthetic construct
  source 1..20: mol_type = other RNA
cctcgacaccaactctagtc

SEQ ID NO: 14303 - RNA, 20 nt, synthetic construct
  source 1..20: mol_type = other RNA
ccttattacaataacctcga

SEQ ID NO: 14304 - RNA, 20 nt, synthetic construct
  source 1..20: mol_type = other RNA
cgacaccaactctagtccgt

SEQ ID NO: 14305 - RNA, 20 nt, synthetic construct
  source 1..20: mol_type = other RNA
cgaggttattgtaataaggg

SEQ ID NO: 14306 - RNA, 20 nt, synthetic construct
  source 1..20: mol_type = other RNA
cggactagagttggtgtcga

SEQ ID NO: 14307 - RNA, 20 nt, synthetic construct
  source 1..20: mol_type = other RNA
ctaagctccatttccctacc

SEQ ID NO: 14308 - RNA, 20 nt, synthetic construct
  source 1..20: mol_type = other RNA
ctaccccacccttattacaa

SEQ ID NO: 14309 - RNA, 20 nt, synthetic construct
  source 1..20: mol_type = other RNA
ctagagttggtgtcgaggtt

SEQ ID NO: 14310 - RNA, 20 nt, synthetic construct
  source 1..20: mol_type = other RNA
ctccatttccctaccccacc

SEQ ID NO: 14311 - RNA, 20 nt, synthetic construct
  source 1..20: mol_type = other RNA
ctcgacaccaactctagtcc

SEQ ID NO: 14312 - RNA, 20 nt, synthetic construct
  source 1..20: mol_type = other RNA
cttagtcattcacctggggc

SEQ ID NO: 14313 - RNA, 20 nt, synthetic construct
  source 1..20: mol_type = other RNA
cttattacaataacctcgac

SEQ ID NO: 14314 - RNA, 20 nt, synthetic construct
  source 1..20: mol_type = other RNA
cttcccacggactagagttg

SEQ ID NO: 14315 - RNA, 20 nt, synthetic construct
  source 1..20: mol_type = other RNA
gaaatggagcttagtcattc

SEQ ID NO: 14316 - RNA, 20 nt, synthetic construct
  source 1..20: mol_type = other RNA
gaatgactaagctccatttc

SEQ ID NO: 14317 - RNA, 20 nt, synthetic construct
  source 1..20: mol_type = other RNA
gacaccaactctagtccgtg

SEQ ID NO: 14318 - RNA, 20 nt, synthetic construct
  source 1..20: mol_type = other RNA
gactaagctccatttcccta

SEQ ID NO: 14319 - RNA, 20 nt, synthetic construct
  source 1..20: mol_type = other RNA
gactagagttggtgtcgagg

SEQ ID NO: 14320 - RNA, 20 nt, synthetic construct
  source 1..20: mol_type = other RNA
gagcttagtcattcacctgg

SEQ ID NO: 14321 - RNA, 20 nt, synthetic construct
  source 1..20: mol_type = other RNA
gaggttattgtaataagggt

SEQ ID NO: 14322 - RNA, 20 nt, synthetic construct
  source 1..20: mol_type = other RNA
gagttggtgtcgaggttatt

SEQ ID NO: 14323 - RNA, 20 nt, synthetic construct
  source 1..20: mol_type = other RNA
gccccaggtgaatgactaag

SEQ ID NO: 14324 - RNA, 20 nt, synthetic construct
  source 1..20: mol_type = other RNA
gctccatttccctaccccac

SEQ ID NO: 14325 - RNA, 20 nt, synthetic construct
  source 1..20: mol_type = other RNA
gcttagtcattcacctgggg

SEQ ID NO: 14326 - RNA, 20 nt, synthetic construct
  source 1..20: mol_type = other RNA
ggaaatggagcttagtcatt

SEQ ID NO: 14327 - RNA, 20 nt, synthetic construct
  source 1..20: mol_type = other RNA
ggactagagttggtgtcgag

SEQ ID NO: 14328 - RNA, 20 nt, synthetic construct
  source 1..20: mol_type = other RNA
ggagcttagtcattcacctg

SEQ ID NO: 14329 - RNA, 20 nt, synthetic construct
  source 1..20: mol_type = other RNA
gggaaatggagcttagtcat

SEQ ID NO: 14330 - RNA, 20 nt, synthetic construct
  source 1..20: mol_type = other RNA
ggggtagggaaatggagctt

SEQ ID NO: 14331 - RNA, 20 nt, synthetic construct
  source 1..20: mol_type = other RNA
gggtagggaaatggagctta

SEQ ID NO: 14332 - RNA, 20 nt, synthetic construct
  source 1..20: mol_type = other RNA
gggtggggtagggaaatgga

SEQ ID NO: 14333 - RNA, 20 nt, synthetic construct
  source 1..20: mol_type = other RNA
ggtagggaaatggagcttag

SEQ ID NO: 14334 - RNA, 20 nt, synthetic construct
  source 1..20: mol_type = other RNA
ggtgaatgactaagctccat

SEQ ID NO: 14335 - RNA, 20 nt, synthetic construct
  source 1..20: mol_type = other RNA
ggtggggtagggaaatggag

SEQ ID NO: 14336 - RNA, 20 nt, synthetic construct
  source 1..20: mol_type = other RNA
ggtgtcgaggttattgtaat

SEQ ID NO: 14337 - RNA, 20 nt, synthetic construct
  source 1..20: mol_type = other RNA
ggttattgtaataagggtgg

SEQ ID NO: 14338 - RNA, 20 nt, synthetic construct
  source 1..20: mol_type = other RNA
gtaataagggtggggtaggg

SEQ ID NO: 14339 - RNA, 20 nt, synthetic construct
  source 1..20: mol_type = other RNA
gtagggaaatggagcttagt

SEQ ID NO: 14340 - RNA, 20 nt, synthetic construct
  source 1..20: mol_type = other RNA
gtcgaggttattgtaataag

SEQ ID NO: 14341 - RNA, 20 nt, synthetic construct
  source 1..20: mol_type = other RNA
gtgaatgactaagctccatt

SEQ ID NO: 14342 - RNA, 20 nt, synthetic construct
  source 1..20: mol_type = other RNA
gtggggtagggaaatggagc

SEQ ID NO: 14343 - RNA, 20 nt, synthetic construct
  source 1..20: mol_type = other RNA
gtgtcgaggttattgtaata

SEQ ID NO: 14344 - RNA, 20 nt, synthetic construct
  source 1..20: mol_type = other RNA
gttattgtaataagggtggg

SEQ ID NO: 14345 - RNA, 20 nt, synthetic construct
  source 1..20: mol_type = other RNA
gttggtgtcgaggttattgt

SEQ ID NO: 14346 - RNA, 20 nt, synthetic construct
  source 1..20: mol_type = other RNA
gtttatcttcccacggacta

SEQ ID NO: 14347 - RNA, 20 nt, synthetic construct
  source 1..20: mol_type = other RNA
taaaatcagccccaggtgaa

SEQ ID NO: 14348 - RNA, 20 nt, synthetic construct
  source 1..20: mol_type = other RNA
taacctcgacaccaactcta

SEQ ID NO: 14349 - RNA, 20 nt, synthetic construct
  source 1..20: mol_type = other RNA
taagctccatttccctaccc

SEQ ID NO: 14350 - RNA, 20 nt, synthetic construct
  source 1..20: mol_type = other RNA
taagggtggggtagggaaat

SEQ ID NO: 14351 - RNA, 20 nt, synthetic construct
  source 1..20: mol_type = other RNA
taataagggtggggtaggga

SEQ ID NO: 14352 - RNA, 20 nt, synthetic construct
  source 1..20: mol_type = other RNA
tacaataacctcgacaccaa

SEQ ID NO: 14353 - RNA, 20 nt, synthetic construct
  source 1..20: mol_type = other RNA
taccccacccttattacaat

SEQ ID NO: 14354 - RNA, 20 nt, synthetic construct
  source 1..20: mol_type = other RNA
tagagttggtgtcgaggtta

SEQ ID NO: 14355 - RNA, 20 nt, synthetic construct
  source 1..20: mol_type = other RNA
tagggaaatggagcttagtc

SEQ ID NO: 14356 - RNA, 20 nt, synthetic construct
  source 1..20: mol_type = other RNA
tagtttatcttcccacggac

SEQ ID NO: 14357 - RNA, 20 nt, synthetic construct
  source 1..20: mol_type = other RNA
tatcttcccacggactagag

SEQ ID NO: 14358 - RNA, 20 nt, synthetic construct
  source 1..20: mol_type = other RNA
tattacaataacctcgacac

SEQ ID NO: 14359 - RNA, 20 nt, synthetic construct
  source 1..20: mol_type = other RNA
tattgtaataagggtggggt

SEQ ID NO: 14360 - RNA, 20 nt, synthetic construct
  source 1..20: mol_type = other RNA
tcagccccaggtgaatgact

SEQ ID NO: 14361 - RNA, 20 nt, synthetic construct
  source 1..20: mol_type = other RNA
tccatttccctaccccaccc

SEQ ID NO: 14362 - RNA, 20 nt, synthetic construct
  source 1..20: mol_type = other RNA
tcccacggactagagttggt

SEQ ID NO: 14363 - RNA, 20 nt, synthetic construct
  source 1..20: mol_type = other RNA
tccctaccccacccttatta

SEQ ID NO: 14364 - RNA, 20 nt, synthetic construct
  source 1..20: mol_type = other RNA
tcgacaccaactctagtccg

SEQ ID NO: 14365 - RNA, 20 nt, synthetic construct
  source 1..20: mol_type = other RNA
tcgaggttattgtaataagg

SEQ ID NO: 14366 - RNA, 20 nt, synthetic construct
  source 1..20: mol_type = other RNA
tcttcccacggactagagtt

SEQ ID NO: 14367 - RNA, 20 nt, synthetic construct
  source 1..20: mol_type = other RNA
tgaatgactaagctccattt

SEQ ID NO: 14368 - RNA, 20 nt, synthetic construct
  source 1..20: mol_type = other RNA
tgactaagctccatttccct

SEQ ID NO: 14369 - RNA, 20 nt, synthetic construct
  source 1..20: mol_type = other RNA
tggagcttagtcattcacct

SEQ ID NO: 14370 - RNA, 20 nt, synthetic construct
  source 1..20: mol_type = other RNA
tggggtagggaaatggagct

SEQ ID NO: 14371 - RNA, 20 nt, synthetic construct
  source 1..20: mol_type = other RNA
tggtgtcgaggttattgtaa

SEQ ID NO: 14372 - RNA, 20 nt, synthetic construct
  source 1..20: mol_type = other RNA
tgtaataagggtggggtagg

SEQ ID NO: 14373 - RNA, 20 nt, synthetic construct
  source 1..20: mol_type = other RNA
tgtcgaggttattgtaataa

SEQ ID NO: 14374 - RNA, 20 nt, synthetic construct
  source 1..20: mol_type = other RNA
ttacaataacctcgacacca

SEQ ID NO: 14375 - RNA, 20 nt, synthetic construct
  source 1..20: mol_type = other RNA
ttagtttatcttcccacgga

SEQ ID NO: 14376 - RNA, 20 nt, synthetic construct
  source 1..20: mol_type = other RNA
ttatcttcccacggactaga

SEQ ID NO: 14377 - RNA, 20 nt, synthetic construct
  source 1..20: mol_type = other RNA
ttattacaataacctcgaca

SEQ ID NO: 14378 - RNA, 20 nt, synthetic construct
  source 1..20: mol_type = other RNA
ttattgtaataagggtgggg

SEQ ID NO: 14379 - RNA, 20 nt, synthetic construct
  source 1..20: mol_type = other RNA
ttcccacggactagagttgg

SEQ ID NO: 14380 - RNA, 20 nt, synthetic construct
  source 1..20: mol_type = other RNA
ttccctaccccacccttatt

SEQ ID NO: 14381 - RNA, 20 nt, synthetic construct
  source 1..20: mol_type = other RNA
ttggtgtcgaggttattgta

SEQ ID NO: 14382 - RNA, 20 nt, synthetic construct
  source 1..20: mol_type = other RNA
ttgtaataagggtggggtag

SEQ ID NO: 14383 - RNA, 20 nt, synthetic construct
  source 1..20: mol_type = other RNA
tttatcttcccacggactag

SEQ ID NO: 14384 - RNA, 20 nt, synthetic construct
  source 1..20: mol_type = other RNA
tttccctaccccacccttat

SEQ ID NO: 14385 - RNA, 21 nt, synthetic construct
  source 1..21: mol_type = other RNA
aaaatcagccccaggtgaatg

SEQ ID NO: 14386 - RNA, 21 nt, synthetic construct
  source 1..21: mol_type = other RNA
aaatcagccccaggtgaatga

SEQ ID NO: 14387 - RNA, 21 nt, synthetic construct
  source 1..21: mol_type = other RNA
aaatggagcttagtcattcac

SEQ ID NO: 14388 - RNA, 21 nt, synthetic construct
  source 1..21: mol_type = other RNA
aacctcgacaccaactctagt

SEQ ID NO: 14389 - RNA, 21 nt, synthetic construct
  source 1..21: mol_type = other RNA
aactctagtccgtgggaagat

SEQ ID NO: 14390 - RNA, 21 nt, synthetic construct
  source 1..21: mol_type = other RNA
aagctccatttccctacccca

SEQ ID NO: 14391 - RNA, 21 nt, synthetic construct
  source 1..21: mol_type = other RNA
aagggtggggtagggaaatgg

SEQ ID NO: 14392 - RNA, 21 nt, synthetic construct
  source 1..21: mol_type = other RNA
aataacctcgacaccaactct

SEQ ID NO: 14393 - RNA, 21 nt, synthetic construct
  source 1..21: mol_type = other RNA
aataagggtggggtagggaaa

SEQ ID NO: 14394 - RNA, 21 nt, synthetic construct
  source 1..21: mol_type = other RNA
aatcagccccaggtgaatgac

SEQ ID NO: 14395 - RNA, 21 nt, synthetic construct
  source 1..21: mol_type = other RNA
aatgactaagctccatttccc

SEQ ID NO: 14396 - RNA, 21 nt, synthetic construct
  source 1..21: mol_type = other RNA
aatggagcttagtcattcacc

SEQ ID NO: 14397 - RNA, 21 nt, synthetic construct
  source 1..21: mol_type = other RNA
acaataacctcgacaccaact

SEQ ID NO: 14398 - RNA, 21 nt, synthetic construct
  source 1..21: mol_type = other RNA
acaccaactctagtccgtggg

SEQ ID NO: 14399 - RNA, 21 nt, synthetic construct
  source 1..21: mol_type = other RNA
accaactctagtccgtgggaa

SEQ ID NO: 14400 - RNA, 21 nt, synthetic construct
  source 1..21: mol_type = other RNA
accccacccttattacaataa

SEQ ID NO: 14401 - RNA, 21 nt, synthetic construct
  source 1..21: mol_type = other RNA
acccttattacaataacctcg

SEQ ID NO: 14402 - RNA, 21 nt, synthetic construct
  source 1..21: mol_type = other RNA
acctcgacaccaactctagtc

SEQ ID NO: 14403 - RNA, 21 nt, synthetic construct
  source 1..21: mol_type = other RNA
acggactagagttggtgtcga

SEQ ID NO: 14404 - RNA, 21 nt, synthetic construct
  source 1..21: mol_type = other RNA
actaagctccatttccctacc

SEQ ID NO: 14405 - RNA, 21 nt, synthetic construct
  source 1..21: mol_type = other RNA
actagagttggtgtcgaggtt

SEQ ID NO: 14406 - RNA, 21 nt, synthetic construct
  source 1..21: mol_type = other RNA
agagttggtgtcgaggttatt

SEQ ID NO: 14407 - RNA, 21 nt, synthetic construct
  source 1..21: mol_type = other RNA
agccccaggtgaatgactaag

SEQ ID NO: 14408 - RNA, 21 nt, synthetic construct
  source 1..21: mol_type = other RNA
agctccatttccctaccccac

SEQ ID NO: 14409 - RNA, 21 nt, synthetic construct
  source 1..21: mol_type = other RNA
agcttagtcattcacctgggg

SEQ ID NO: 14410 - RNA, 21 nt, synthetic construct
  source 1..21: mol_type = other RNA
agggaaatggagcttagtcat

SEQ ID NO: 14411 - RNA, 21 nt, synthetic construct
  source 1..21: mol_type = other RNA
agggtggggtagggaaatgga

SEQ ID NO: 14412 - RNA, 21 nt, synthetic construct
  source 1..21: mol_type = other RNA
aggtgaatgactaagctccat

SEQ ID NO: 14413 - RNA, 21 nt, synthetic construct
  source 1..21: mol_type = other RNA
aggttattgtaataagggtgg

SEQ ID NO: 14414 - RNA, 21 nt, synthetic construct
  source 1..21: mol_type = other RNA
agttggtgtcgaggttattgt

SEQ ID NO: 14415 - RNA, 21 nt, synthetic construct
  source 1..21: mol_type = other RNA
agtttatcttcccacggacta

SEQ ID NO: 14416 - RNA, 21 nt, synthetic construct
  source 1..21: mol_type = other RNA
ataacctcgacaccaactcta

SEQ ID NO: 14417 - RNA, 21 nt, synthetic construct
  source 1..21: mol_type = other RNA
ataagggtggggtagggaaat

SEQ ID NO: 14418 - RNA, 21 nt, synthetic construct
  source 1..21: mol_type = other RNA
atcagccccaggtgaatgact

SEQ ID NO: 14419 - RNA, 21 nt, synthetic construct
  source 1..21: mol_type = other RNA
atcttcccacggactagagtt

SEQ ID NO: 14420 - RNA, 21 nt, synthetic construct
  source 1..21: mol_type = other RNA
atgactaagctccatttccct

SEQ ID NO: 14421 - RNA, 21 nt, synthetic construct
  source 1..21: mol_type = other RNA
atggagcttagtcattcacct

SEQ ID NO: 14422 - RNA, 21 nt, synthetic construct
  source 1..21: mol_type = other RNA
attacaataacctcgacacca

SEQ ID NO: 14423 - RNA, 21 nt, synthetic construct
  source 1..21: mol_type = other RNA
attagtttatcttcccacgga

SEQ ID NO: 14424 - RNA, 21 nt, synthetic construct
  source 1..21: mol_type = other RNA
attgtaataagggtggggtag

SEQ ID NO: 14425 - RNA, 21 nt, synthetic construct
  source 1..21: mol_type = other RNA
atttccctaccccacccttat

SEQ ID NO: 14426 - RNA, 21 nt, synthetic construct
  source 1..21: mol_type = other RNA
caactctagtccgtgggaaga

SEQ ID NO: 14427 - RNA, 21 nt, synthetic construct
  source 1..21: mol_type = other RNA
caataacctcgacaccaactc

SEQ ID NO: 14428 - RNA, 21 nt, synthetic construct
  source 1..21: mol_type = other RNA
caccaactctagtccgtggga

SEQ ID NO: 14429 - RNA, 21 nt, synthetic construct
  source 1..21: mol_type = other RNA
cacccttattacaataacctc

SEQ ID NO: 14430 - RNA, 21 nt, synthetic construct
  source 1..21: mol_type = other RNA
cacggactagagttggtgtcg

SEQ ID NO: 14431 - RNA, 21 nt, synthetic construct
  source 1..21: mol_type = other RNA
cagccccaggtgaatgactaa

SEQ ID NO: 14432 - RNA, 21 nt, synthetic construct
  source 1..21: mol_type = other RNA
caggtgaatgactaagctcca

SEQ ID NO: 14433 - RNA, 21 nt, synthetic construct
  source 1..21: mol_type = other RNA
catttccctaccccaccctta

SEQ ID NO: 14434 - RNA, 21 nt, synthetic construct
  source 1..21: mol_type = other RNA
ccaactctagtccgtgggaag

SEQ ID NO: 14435 - RNA, 21 nt, synthetic construct
  source 1..21: mol_type = other RNA
ccacccttattacaataacct

SEQ ID NO: 14436 - RNA, 21 nt, synthetic construct
  source 1..21: mol_type = other RNA
ccacggactagagttggtgtc

SEQ ID NO: 14437 - RNA, 21 nt, synthetic construct
  source 1..21: mol_type = other RNA
ccaggtgaatgactaagctcc

SEQ ID NO: 14438 - RNA, 21 nt, synthetic construct
  source 1..21: mol_type = other RNA
ccatttccctaccccaccctt

SEQ ID NO: 14439 - RNA, 21 nt, synthetic construct
  source 1..21: mol_type = other RNA
cccacccttattacaataacc

SEQ ID NO: 14440 - RNA, 21 nt, synthetic construct
  source 1..21: mol_type = other RNA
cccacggactagagttggtgt

SEQ ID NO: 14441 - RNA, 21 nt, synthetic construct
  source 1..21: mol_type = other RNA
cccaggtgaatgactaagctc

SEQ ID NO: 14442 - RNA, 21 nt, synthetic construct
  source 1..21: mol_type = other RNA
ccccacccttattacaataac

SEQ ID NO: 14443 - RNA, 21 nt, synthetic construct
  source 1..21: mol_type = other RNA
ccccaggtgaatgactaagct

SEQ ID NO: 14444 - RNA, 21 nt, synthetic construct
  source 1..21: mol_type = other RNA
ccctaccccacccttattaca

SEQ ID NO: 14445 - RNA, 21 nt, synthetic construct
  source 1..21: mol_type = other RNA
cccttattacaataacctcga

SEQ ID NO: 14446 - RNA, 21 nt, synthetic construct
  source 1..21: mol_type = other RNA
cctaccccacccttattacaa

SEQ ID NO: 14447 - RNA, 21 nt, synthetic construct
  source 1..21: mol_type = other RNA
cctcgacaccaactctagtcc

SEQ ID NO: 14448 - RNA, 21 nt, synthetic construct
  source 1..21: mol_type = other RNA
ccttattacaataacctcgac

SEQ ID NO: 14449 - RNA, 21 nt, synthetic construct
  source 1..21: mol_type = other RNA
cgacaccaactctagtccgtg

SEQ ID NO: 14450 - RNA, 21 nt, synthetic construct
  source 1..21: mol_type = other RNA
cgaggttattgtaataagggt

SEQ ID NO: 14451 - RNA, 21 nt, synthetic construct
  source 1..21: mol_type = other RNA
cggactagagttggtgtcgag

SEQ ID NO: 14452 - RNA, 21 nt, synthetic construct
  source 1..21: mol_type = other RNA
ctaagctccatttccctaccc

SEQ ID NO: 14453 - RNA, 21 nt, synthetic construct
  source 1..21: mol_type = other RNA
ctaccccacccttattacaat

SEQ ID NO: 14454 - RNA, 21 nt, synthetic construct
  source 1..21: mol_type = other RNA
ctagagttggtgtcgaggtta

SEQ ID NO: 14455 - RNA, 21 nt, synthetic construct
  source 1..21: mol_type = other RNA
ctccatttccctaccccaccc

SEQ ID NO: 14456 - RNA, 21 nt, synthetic construct
  source 1..21: mol_type = other RNA
ctcgacaccaactctagtccg

SEQ ID NO: 14457 - RNA, 21 nt, synthetic construct
  source 1..21: mol_type = other RNA
cttattacaataacctcgaca

SEQ ID NO: 14458 - RNA, 21 nt, synthetic construct
  source 1..21: mol_type = other RNA
cttcccacggactagagttgg

SEQ ID NO: 14459 - RNA, 21 nt, synthetic construct
  source 1..21: mol_type = other RNA
gaaatggagcttagtcattca

SEQ ID NO: 14460 - RNA, 21 nt, synthetic construct
  source 1..21: mol_type = other RNA
gaatgactaagctccatttcc

SEQ ID NO: 14461 - RNA, 21 nt, synthetic construct
  source 1..21: mol_type = other RNA
gacaccaactctagtccgtgg

SEQ ID NO: 14462 - RNA, 21 nt, synthetic construct
  source 1..21: mol_type = other RNA
gactaagctccatttccctac

SEQ ID NO: 14463 - RNA, 21 nt, synthetic construct
  source 1..21: mol_type = other RNA
gactagagttggtgtcgaggt

SEQ ID NO: 14464 - RNA, 21 nt, synthetic construct
  source 1..21: mol_type = other RNA
gagcttagtcattcacctggg

SEQ ID NO: 14465 - RNA, 21 nt, synthetic construct
  source 1..21: mol_type = other RNA
gaggttattgtaataagggtg

SEQ ID NO: 14466 - RNA, 21 nt, synthetic construct
  source 1..21: mol_type = other RNA
gagttggtgtcgaggttattg

SEQ ID NO: 14467 - RNA, 21 nt, synthetic construct
  source 1..21: mol_type = other RNA
gccccaggtgaatgactaagc

SEQ ID NO: 14468 - RNA, 21 nt, synthetic construct
  source 1..21: mol_type = other RNA
gctccatttccctaccccacc

SEQ ID NO: 14469 - RNA, 21 nt, synthetic construct
  source 1..21: mol_type = other RNA
gcttagtcattcacctggggc

SEQ ID NO: 14470 - RNA, 21 nt, synthetic construct
  source 1..21: mol_type = other RNA
ggaaatggagcttagtcattc

SEQ ID NO: 14471 - RNA, 21 nt, synthetic construct
  source 1..21: mol_type = other RNA
ggactagagttggtgtcgagg

SEQ ID NO: 14472 - RNA, 21 nt, synthetic construct
  source 1..21: mol_type = other RNA
ggagcttagtcattcacctgg

SEQ ID NO: 14473 - RNA, 21 nt, synthetic construct
  source 1..21: mol_type = other RNA
gggaaatggagcttagtcatt

SEQ ID NO: 14474 - RNA, 21 nt, synthetic construct
  source 1..21: mol_type = other RNA
ggggtagggaaatggagctta

SEQ ID NO: 14475 - RNA, 21 nt, synthetic construct
  source 1..21: mol_type = other RNA
gggtagggaaatggagcttag

SEQ ID NO: 14476 - RNA, 21 nt, synthetic construct
  source 1..21: mol_type = other RNA
gggtggggtagggaaatggag

SEQ ID NO: 14477 - RNA, 21 nt, synthetic construct
  source 1..21: mol_type = other RNA
ggtagggaaatggagcttagt

SEQ ID NO: 14478 - RNA, 21 nt, synthetic construct
  source 1..21: mol_type = other RNA
ggtgaatgactaagctccatt

SEQ ID NO: 14479 - RNA, 21 nt, synthetic construct
  source 1..21: mol_type = other RNA
ggtggggtagggaaatggagc

SEQ ID NO: 14480 - RNA, 21 nt, synthetic construct
  source 1..21: mol_type = other RNA
ggtgtcgaggttattgtaata

SEQ ID NO: 14481 - RNA, 21 nt, synthetic construct
  source 1..21: mol_type = other RNA
ggttattgtaataagggtggg

SEQ ID NO: 14482 - RNA, 21 nt, synthetic construct
  source 1..21: mol_type = other RNA
gtaataagggtggggtaggga

SEQ ID NO: 14483 - RNA, 21 nt, synthetic construct
  source 1..21: mol_type = other RNA
gtagggaaatggagcttagtc

SEQ ID NO: 14484 - RNA, 21 nt, synthetic construct
  source 1..21: mol_type = other RNA
gtcgaggttattgtaataagg

SEQ ID NO: 14485 - RNA, 21 nt, synthetic construct
  source 1..21: mol_type = other RNA
gtgaatgactaagctccattt

SEQ ID NO: 14486 - RNA, 21 nt, synthetic construct
  source 1..21: mol_type = other RNA
gtggggtagggaaatggagct

SEQ ID NO: 14487 - RNA, 21 nt, synthetic construct
  source 1..21: mol_type = other RNA
gtgtcgaggttattgtaataa

SEQ ID NO: 14488 - RNA, 21 nt, synthetic construct
  source 1..21: mol_type = other RNA
gttattgtaataagggtgggg

SEQ ID NO: 14489 - RNA, 21 nt, synthetic construct
  source 1..21: mol_type = other RNA
gttggtgtcgaggttattgta

SEQ ID NO: 14490 - RNA, 21 nt, synthetic construct
  source 1..21: mol_type = other RNA
gtttatcttcccacggactag

SEQ ID NO: 14491 - RNA, 21 nt, synthetic construct
  source 1..21: mol_type = other RNA
taaaatcagccccaggtgaat

SEQ ID NO: 14492 - RNA, 21 nt, synthetic construct
  source 1..21: mol_type = other RNA
taacctcgacaccaactctag

SEQ ID NO: 14493 - RNA, 21 nt, synthetic construct
  source 1..21: mol_type = other RNA
taagctccatttccctacccc

SEQ ID NO: 14494 - RNA, 21 nt, synthetic construct
  source 1..21: mol_type = other RNA
taagggtggggtagggaaatg

SEQ ID NO: 14495 - RNA, 21 nt, synthetic construct
  source 1..21: mol_type = other RNA
taataagggtggggtagggaa

SEQ ID NO: 14496 - RNA, 21 nt, synthetic construct
  source 1..21: mol_type = other RNA
tacaataacctcgacaccaac

SEQ ID NO: 14497 - RNA, 21 nt, synthetic construct
  source 1..21: mol_type = other RNA
taccccacccttattacaata

SEQ ID NO: 14498 - RNA, 21 nt, synthetic construct
  source 1..21: mol_type = other RNA
tagagttggtgtcgaggttat

SEQ ID NO: 14499 - RNA, 21 nt, synthetic construct
  source 1..21: mol_type = other RNA
tagggaaatggagcttagtca

SEQ ID NO: 14500 - RNA, 21 nt, synthetic construct
  source 1..21: mol_type = other RNA
tagtttatcttcccacggact

SEQ ID NO: 14501 - RNA, 21 nt, synthetic construct
  source 1..21: mol_type = other RNA
tatcttcccacggactagagt

SEQ ID NO: 14502 - RNA, 21 nt, synthetic construct
  source 1..21: mol_type = other RNA
tattacaataacctcgacacc

SEQ ID NO: 14503 - RNA, 21 nt, synthetic construct
  source 1..21: mol_type = other RNA
tattgtaataagggtggggta

SEQ ID NO: 14504 - RNA, 21 nt, synthetic construct
  source 1..21: mol_type = other RNA
tcagccccaggtgaatgacta

SEQ ID NO: 14505 - RNA, 21 nt, synthetic construct
  source 1..21: mol_type = other RNA
tccatttccctaccccaccct

SEQ ID NO: 14506 - RNA, 21 nt, synthetic construct
  source 1..21: mol_type = other RNA
tcccacggactagagttggtg

SEQ ID NO: 14507 - RNA, 21 nt, synthetic construct
  source 1..21: mol_type = other RNA
tccctaccccacccttattac

SEQ ID NO: 14508 - RNA, 21 nt, synthetic construct
  source 1..21: mol_type = other RNA
tcgacaccaactctagtccgt

SEQ ID NO: 14509 - RNA, 21 nt, synthetic construct
  source 1..21: mol_type = other RNA
tcgaggttattgtaataaggg

SEQ ID NO: 14510 - RNA, 21 nt, synthetic construct
  source 1..21: mol_type = other RNA
tcttcccacggactagagttg

SEQ ID NO: 14511 - RNA, 21 nt, synthetic construct
  source 1..21: mol_type = other RNA
tgaatgactaagctccatttc

SEQ ID NO: 14512 - RNA, 21 nt, synthetic construct
  source 1..21: mol_type = other RNA
tgactaagctccatttcccta

SEQ ID NO: 14513 - RNA, 21 nt, synthetic construct
  source 1..21: mol_type = other RNA
tggagcttagtcattcacctg

SEQ ID NO: 14514 - RNA, 21 nt, synthetic construct
  source 1..21: mol_type = other RNA
tggggtagggaaatggagctt

SEQ ID NO: 14515 - RNA, 21 nt, synthetic construct
  source 1..21: mol_type = other RNA
tggtgtcgaggttattgtaat

SEQ ID NO: 14516 - RNA, 21 nt, synthetic construct
  source 1..21: mol_type = other RNA
tgtaataagggtggggtaggg

SEQ ID NO: 14517 - RNA, 21 nt, synthetic construct
  source 1..21: mol_type = other RNA
tgtcgaggttattgtaataag

SEQ ID NO: 14518 - RNA, 21 nt, synthetic construct
  source 1..21: mol_type = other RNA
ttacaataacctcgacaccaa

SEQ ID NO: 14519 - RNA, 21 nt, synthetic construct
  source 1..21: mol_type = other RNA
ttagtttatcttcccacggac

SEQ ID NO: 14520 - RNA, 21 nt, synthetic construct
  source 1..21: mol_type = other RNA
ttatcttcccacggactagag

SEQ ID NO: 14521 - RNA, 21 nt, synthetic construct
  source 1..21: mol_type = other RNA
ttattacaataacctcgacac

SEQ ID NO: 14522 - RNA, 21 nt, synthetic construct
  source 1..21: mol_type = other RNA
ttattgtaataagggtggggt

SEQ ID NO: 14523 - RNA, 21 nt, synthetic construct
  source 1..21: mol_type = other RNA
ttcccacggactagagttggt

SEQ ID NO: 14524 - RNA, 21 nt, synthetic construct
  source 1..21: mol_type = other RNA
ttccctaccccacccttatta

SEQ ID NO: 14525 - RNA, 21 nt, synthetic construct
  source 1..21: mol_type = other RNA
ttggtgtcgaggttattgtaa

SEQ ID NO: 14526 - RNA, 21 nt, synthetic construct
  source 1..21: mol_type = other RNA
ttgtaataagggtggggtagg

SEQ ID NO: 14527 - RNA, 21 nt, synthetic construct
  source 1..21: mol_type = other RNA
tttatcttcccacggactaga

SEQ ID NO: 14528 - RNA, 21 nt, synthetic construct
  source 1..21: mol_type = other RNA
tttccctaccccacccttatt

SEQ ID NO: 14529 - RNA, 22 nt, synthetic construct
  source 1..22: mol_type = other RNA
aaaatcagccccaggtgaatga

SEQ ID NO: 14530 - RNA, 22 nt, synthetic construct
  source 1..22: mol_type = other RNA
aaatcagccccaggtgaatgac

SEQ ID NO: 14531 - RNA, 22 nt, synthetic construct
  source 1..22: mol_type = other RNA
aaatggagcttagtcattcacc

SEQ ID NO: 14532 - RNA, 22 nt, synthetic construct
  source 1..22: mol_type = other RNA
aacctcgacaccaactctagtc

SEQ ID NO: 14533 - RNA, 22 nt, synthetic construct
  source 1..22: mol_type = other RNA
aagctccatttccctaccccac

SEQ ID NO: 14534 - RNA, 22 nt, synthetic construct
  source 1..22: mol_type = other RNA
aagggtggggtagggaaatgga

SEQ ID NO: 14535 - RNA, 22 nt, synthetic construct
  source 1..22: mol_type = other RNA
aataacctcgacaccaactcta

SEQ ID NO: 14536 - RNA, 22 nt, synthetic construct
  source 1..22: mol_type = other RNA
aataagggtggggtagggaaat

SEQ ID NO: 14537 - RNA, 22 nt, synthetic construct
  source 1..22: mol_type = other RNA
aatcagccccaggtgaatgact

SEQ ID NO: 14538 - RNA, 22 nt, synthetic construct
  source 1..22: mol_type = other RNA
aatgactaagctccatttccct

SEQ ID NO: 14539 - RNA, 22 nt, synthetic construct
  source 1..22: mol_type = other RNA
aatggagcttagtcattcacct

SEQ ID NO: 14540 - RNA, 22 nt, synthetic construct
  source 1..22: mol_type = other RNA
acaataacctcgacaccaactc

SEQ ID NO: 14541 - RNA, 22 nt, synthetic construct
  source 1..22: mol_type = other RNA
acaccaactctagtccgtggga

SEQ ID NO: 14542 - RNA, 22 nt, synthetic construct
  source 1..22: mol_type = other RNA
accaactctagtccgtgggaag

SEQ ID NO: 14543 - RNA, 22 nt, synthetic construct
  source 1..22: mol_type = other RNA
accccacccttattacaataac

SEQ ID NO: 14544 - RNA, 22 nt, synthetic construct
  source 1..22: mol_type = other RNA
acccttattacaataacctcga

SEQ ID NO: 14545 - RNA, 22 nt, synthetic construct
  source 1..22: mol_type = other RNA
acctcgacaccaactctagtcc

SEQ ID NO: 14546 - RNA, 22 nt, synthetic construct
  source 1..22: mol_type = other RNA
acggactagagttggtgtcgag

SEQ ID NO: 14547 - RNA, 22 nt, synthetic construct
  source 1..22: mol_type = other RNA
actaagctccatttccctaccc

SEQ ID NO: 14548 - RNA, 22 nt, synthetic construct
  source 1..22: mol_type = other RNA
actagagttggtgtcgaggtta

SEQ ID NO: 14549 - RNA, 22 nt, synthetic construct
  source 1..22: mol_type = other RNA
agagttggtgtcgaggttattg

SEQ ID NO: 14550 - RNA, 22 nt, synthetic construct
  source 1..22: mol_type = other RNA
agccccaggtgaatgactaagc

SEQ ID NO: 14551 - RNA, 22 nt, synthetic construct
  source 1..22: mol_type = other RNA
agctccatttccctaccccacc

SEQ ID NO: 14552 - RNA, 22 nt, synthetic construct
  source 1..22: mol_type = other RNA
agcttagtcattcacctggggc

SEQ ID NO: 14553 - RNA, 22 nt, synthetic construct
  source 1..22: mol_type = other RNA
agggaaatggagcttagtcatt

SEQ ID NO: 14554 - RNA, 22 nt, synthetic construct
  source 1..22: mol_type = other RNA
agggtggggtagggaaatggag

SEQ ID NO: 14555 - RNA, 22 nt, synthetic construct
  source 1..22: mol_type = other RNA
aggtgaatgactaagctccatt

SEQ ID NO: 14556 - RNA, 22 nt, synthetic construct
  source 1..22: mol_type = other RNA
aggttattgtaataagggtggg

SEQ ID NO: 14557 - RNA, 22 nt, synthetic construct
  source 1..22: mol_type = other RNA
agttggtgtcgaggttattgta

SEQ ID NO: 14558 - RNA, 22 nt, synthetic construct
  source 1..22: mol_type = other RNA
agtttatcttcccacggactag

SEQ ID NO: 14559 - RNA, 22 nt, synthetic construct
  source 1..22: mol_type = other RNA
ataacctcgacaccaactctag

SEQ ID NO: 14560 - RNA, 22 nt, synthetic construct
  source 1..22: mol_type = other RNA
ataagggtggggtagggaaatg

SEQ ID NO: 14561 - RNA, 22 nt, synthetic construct
  source 1..22: mol_type = other RNA
atcagccccaggtgaatgacta

SEQ ID NO: 14562 - RNA, 22 nt, synthetic construct
  source 1..22: mol_type = other RNA
atcttcccacggactagagttg

SEQ ID NO: 14563 - RNA, 22 nt, synthetic construct
  source 1..22: mol_type = other RNA
atgactaagctccatttcccta

SEQ ID NO: 14564 - RNA, 22 nt, synthetic construct
  source 1..22: mol_type = other RNA
atggagcttagtcattcacctg

SEQ ID NO: 14565 - RNA, 22 nt, synthetic construct
  source 1..22: mol_type = other RNA
attacaataacctcgacaccaa

SEQ ID NO: 14566 - RNA, 22 nt, synthetic construct
  source 1..22: mol_type = other RNA
attagtttatcttcccacggac

SEQ ID NO: 14567 - RNA, 22 nt, synthetic construct
  source 1..22: mol_type = other RNA
attgtaataagggtggggtagg

SEQ ID NO: 14568 - RNA, 22 nt, synthetic construct
  source 1..22: mol_type = other RNA
atttccctaccccacccttatt

SEQ ID NO: 14569 - RNA, 22 nt, synthetic construct
  source 1..22: mol_type = other RNA
caactctagtccgtgggaagat

SEQ ID NO: 14570 - RNA, 22 nt, synthetic construct
  source 1..22: mol_type = other RNA
caataacctcgacaccaactct

SEQ ID NO: 14571 - RNA, 22 nt, synthetic construct
  source 1..22: mol_type = other RNA
caccaactctagtccgtgggaa

SEQ ID NO: 14572 - RNA, 22 nt, synthetic construct
  source 1..22: mol_type = other RNA
cacccttattacaataacctcg

SEQ ID NO: 14573 - RNA, 22 nt, synthetic construct
  source 1..22: mol_type = other RNA
cacggactagagttggtgtcga

SEQ ID NO: 14574 - RNA, 22 nt, synthetic construct
  source 1..22: mol_type = other RNA
cagccccaggtgaatgactaag

SEQ ID NO: 14575 - RNA, 22 nt, synthetic construct
  source 1..22: mol_type = other RNA
caggtgaatgactaagctccat

SEQ ID NO: 14576 - RNA, 22 nt, synthetic construct
  source 1..22: mol_type = other RNA
catttccctaccccacccttat

SEQ ID NO: 14577 - RNA, 22 nt, synthetic construct
  source 1..22: mol_type = other RNA
ccaactctagtccgtgggaaga

SEQ ID NO: 14578 - RNA, 22 nt, synthetic construct
  source 1..22: mol_type = other RNA
ccacccttattacaataacctc

SEQ ID NO: 14579 - RNA, 22 nt, synthetic construct
  source 1..22: mol_type = other RNA
ccacggactagagttggtgtcg

SEQ ID NO: 14580 - RNA, 22 nt, synthetic construct
  source 1..22: mol_type = other RNA
ccaggtgaatgactaagctcca

SEQ ID NO: 14581 - RNA, 22 nt, synthetic construct
  source 1..22: mol_type = other RNA
ccatttccctaccccaccctta

SEQ ID NO: 14582 - RNA, 22 nt, synthetic construct
  source 1..22: mol_type = other RNA
cccacccttattacaataacct

SEQ ID NO: 14583 - RNA, 22 nt, synthetic construct
  source 1..22: mol_type = other RNA
cccacggactagagttggtgtc

SEQ ID NO: 14584 - RNA, 22 nt, synthetic construct
  source 1..22: mol_type = other RNA
cccaggtgaatgactaagctcc

SEQ ID NO: 14585 - RNA, 22 nt, synthetic construct
  source 1..22: mol_type = other RNA
ccccacccttattacaataacc

SEQ ID NO: 14586 - RNA, 22 nt, synthetic construct
  source 1..22: mol_type = other RNA
ccccaggtgaatgactaagctc

SEQ ID NO: 14587 - RNA, 22 nt, synthetic construct
  source 1..22: mol_type = other RNA
ccctaccccacccttattacaa

SEQ ID NO: 14588 - RNA, 22 nt, synthetic construct
  source 1..22: mol_type = other RNA
cccttattacaataacctcgac

SEQ ID NO: 14589 - RNA, 22 nt, synthetic construct
  source 1..22: mol_type = other RNA
cctaccccacccttattacaat

SEQ ID NO: 14590 - RNA, 22 nt, synthetic construct
  source 1..22: mol_type = other RNA
cctcgacaccaactctagtccg

SEQ ID NO: 14591 - RNA, 22 nt, synthetic construct
  source 1..22: mol_type = other RNA
ccttattacaataacctcgaca

SEQ ID NO: 14592 - RNA, 22 nt, synthetic construct
  source 1..22: mol_type = other RNA
cgacaccaactctagtccgtgg

SEQ ID NO: 14593 - RNA, 22 nt, synthetic construct
  source 1..22: mol_type = other RNA
cgaggttattgtaataagggtg

SEQ ID NO: 14594 - RNA, 22 nt, synthetic construct
  source 1..22: mol_type = other RNA
cggactagagttggtgtcgagg

SEQ ID NO: 14595 - RNA, 22 nt, synthetic construct
  source 1..22: mol_type = other RNA
ctaagctccatttccctacccc

SEQ ID NO: 14596 - RNA, 22 nt, synthetic construct
  source 1..22: mol_type = other RNA
ctaccccacccttattacaata

SEQ ID NO: 14597 - RNA, 22 nt, synthetic construct
  source 1..22: mol_type = other RNA
ctagagttggtgtcgaggttat

SEQ ID NO: 14598 - RNA, 22 nt, synthetic construct
  source 1..22: mol_type = other RNA
ctccatttccctaccccaccct

SEQ ID NO: 14599 - RNA, 22 nt, synthetic construct
  source 1..22: mol_type = other RNA
ctcgacaccaactctagtccgt

SEQ ID NO: 14600 - RNA, 22 nt, synthetic construct
  source 1..22: mol_type = other RNA
cttattacaataacctcgacac

SEQ ID NO: 14601 - RNA, 22 nt, synthetic construct
  source 1..22: mol_type = other RNA
cttcccacggactagagttggt

SEQ ID NO: 14602 - RNA, 22 nt, synthetic construct
  source 1..22: mol_type = other RNA
gaaatggagcttagtcattcac

SEQ ID NO: 14603 - RNA, 22 nt, synthetic construct
  source 1..22: mol_type = other RNA
gaatgactaagctccatttccc

SEQ ID NO: 14604 - RNA, 22 nt, synthetic construct
  source 1..22: mol_type = other RNA
gacaccaactctagtccgtggg

SEQ ID NO: 14605 - RNA, 22 nt, synthetic construct
  source 1..22: mol_type = other RNA
gactaagctccatttccctacc

SEQ ID NO: 14606 - RNA, 22 nt, synthetic construct
  source 1..22: mol_type = other RNA
gactagagttggtgtcgaggtt

SEQ ID NO: 14607 - RNA, 22 nt, synthetic construct
  source 1..22: mol_type = other RNA
gagcttagtcattcacctgggg

SEQ ID NO: 14608 - RNA, 22 nt, synthetic construct
  source 1..22: mol_type = other RNA
gaggttattgtaataagggtgg

SEQ ID NO: 14609 - RNA, 22 nt, synthetic construct
  source 1..22: mol_type = other RNA
gagttggtgtcgaggttattgt

SEQ ID NO: 14610 - RNA, 22 nt, synthetic construct
  source 1..22: mol_type = other RNA
gccccaggtgaatgactaagct

SEQ ID NO: 14611 - RNA, 22 nt, synthetic construct
  source 1..22: mol_type = other RNA
gctccatttccctaccccaccc

SEQ ID NO: 14612 - RNA, 22 nt, synthetic construct
  source 1..22: mol_type = other RNA
ggaaatggagcttagtcattca

SEQ ID NO: 14613 - RNA, 22 nt, synthetic construct
  source 1..22: mol_type = other RNA
ggactagagttggtgtcgaggt

SEQ ID NO: 14614 - RNA, 22 nt, synthetic construct
  source 1..22: mol_type = other RNA
ggagcttagtcattcacctggg

SEQ ID NO: 14615 - RNA, 22 nt, synthetic construct
  source 1..22: mol_type = other RNA
gggaaatggagcttagtcattc

SEQ ID NO: 14616 - RNA, 22 nt, synthetic construct
  source 1..22: mol_type = other RNA
ggggtagggaaatggagcttag

SEQ ID NO: 14617 - RNA, 22 nt, synthetic construct
  source 1..22: mol_type = other RNA
gggtagggaaatggagcttagt

SEQ ID NO: 14618 - RNA, 22 nt, synthetic construct
  source 1..22: mol_type = other RNA
gggtggggtagggaaatggagc

SEQ ID NO: 14619 - RNA, 22 nt, synthetic construct
  source 1..22: mol_type = other RNA
ggtagggaaatggagcttagtc

SEQ ID NO: 14620 - RNA, 22 nt, synthetic construct
  source 1..22: mol_type = other RNA
ggtgaatgactaagctccattt

SEQ ID NO: 14621 - RNA, 22 nt, synthetic construct
  source 1..22: mol_type = other RNA
ggtggggtagggaaatggagct

SEQ ID NO: 14622 - RNA, 22 nt, synthetic construct
  source 1..22: mol_type = other RNA
ggtgtcgaggttattgtaataa

SEQ ID NO: 14623 - RNA, 22 nt, synthetic construct
  source 1..22: mol_type = other RNA
ggttattgtaataagggtgggg

SEQ ID NO: 14624 - RNA, 22 nt, synthetic construct
  source 1..22: mol_type = other RNA
gtaataagggtggggtagggaa

SEQ ID NO: 14625 - RNA, 22 nt, synthetic construct
  source 1..22: mol_type = other RNA
gtagggaaatggagcttagtca

SEQ ID NO: 14626 - RNA, 22 nt, synthetic construct
  source 1..22: mol_type = other RNA
gtcgaggttattgtaataaggg

SEQ ID NO: 14627 - RNA, 22 nt, synthetic construct
  source 1..22: mol_type = other RNA
gtgaatgactaagctccatttc

SEQ ID NO: 14628 - RNA, 22 nt, synthetic construct
  source 1..22: mol_type = other RNA
gtggggtagggaaatggagctt

SEQ ID NO: 14629 - RNA, 22 nt, synthetic construct
  source 1..22: mol_type = other RNA
gtgtcgaggttattgtaataag

SEQ ID NO: 14630 - RNA, 22 nt, synthetic construct
  source 1..22: mol_type = other RNA
gttattgtaataagggtggggt

SEQ ID NO: 14631 - RNA, 22 nt, synthetic construct
  source 1..22: mol_type = other RNA
gttggtgtcgaggttattgtaa

SEQ ID NO: 14632 - RNA, 22 nt, synthetic construct
  source 1..22: mol_type = other RNA
gtttatcttcccacggactaga

SEQ ID NO: 14633 - RNA, 22 nt, synthetic construct
  source 1..22: mol_type = other RNA
taaaatcagccccaggtgaatg

SEQ ID NO: 14634 - RNA, 22 nt, synthetic construct
  source 1..22: mol_type = other RNA
taacctcgacaccaactctagt

SEQ ID NO: 14635 - RNA, 22 nt, synthetic construct
  source 1..22: mol_type = other RNA
taagctccatttccctacccca

SEQ ID NO: 14636 - RNA, 22 nt, synthetic construct
  source 1..22: mol_type = other RNA
taagggtggggtagggaaatgg

SEQ ID NO: 14637 - RNA, 22 nt, synthetic construct
  source 1..22: mol_type = other RNA
taataagggtggggtagggaaa

SEQ ID NO: 14638 - RNA, 22 nt, synthetic construct
  source 1..22: mol_type = other RNA
tacaataacctcgacaccaact

SEQ ID NO: 14639 - RNA, 22 nt, synthetic construct
  source 1..22: mol_type = other RNA
taccccacccttattacaataa

SEQ ID NO: 14640 - RNA, 22 nt, synthetic construct
  source 1..22: mol_type = other RNA
tagagttggtgtcgaggttatt

SEQ ID NO: 14641 - RNA, 22 nt, synthetic construct
  source 1..22: mol_type = other RNA
tagggaaatggagcttagtcat

SEQ ID NO: 14642 - RNA, 22 nt, synthetic construct
  source 1..22: mol_type = other RNA
tagtttatcttcccacggacta

SEQ ID NO: 14643 - RNA, 22 nt, synthetic construct
  source 1..22: mol_type = other RNA
tatcttcccacggactagagtt

SEQ ID NO: 14644 - RNA, 22 nt, synthetic construct
  source 1..22: mol_type = other RNA
tattacaataacctcgacacca

SEQ ID NO: 14645 - RNA, 22 nt, synthetic construct
  source 1..22: mol_type = other RNA
tattgtaataagggtggggtag

SEQ ID NO: 14646 - RNA, 22 nt, synthetic construct
  source 1..22: mol_type = other RNA
tcagccccaggtgaatgactaa

SEQ ID NO: 14647 - RNA, 22 nt, synthetic construct
  source 1..22: mol_type = other RNA
tccatttccctaccccaccctt

SEQ ID NO: 14648 - RNA, 22 nt, synthetic construct
  source 1..22: mol_type = other RNA
tcccacggactagagttggtgt

SEQ ID NO: 14649 - RNA, 22 nt, synthetic construct
  source 1..22: mol_type = other RNA
tccctaccccacccttattaca

SEQ ID NO: 14650 - RNA, 22 nt, synthetic construct
  source 1..22: mol_type = other RNA
tcgacaccaactctagtccgtg

SEQ ID NO: 14651 - RNA, 22 nt, synthetic construct
  source 1..22: mol_type = other RNA
tcgaggttattgtaataagggt

SEQ ID NO: 14652 - RNA, 22 nt, synthetic construct
  source 1..22: mol_type = other RNA
tcttcccacggactagagttgg

SEQ ID NO: 14653 - RNA, 22 nt, synthetic construct
  source 1..22: mol_type = other RNA
tgaatgactaagctccatttcc

SEQ ID NO: 14654 - RNA, 22 nt, synthetic construct
  source 1..22: mol_type = other RNA
tgactaagctccatttccctac

SEQ ID NO: 14655 - RNA, 22 nt, synthetic construct
  source 1..22: mol_type = other RNA
tggagcttagtcattcacctgg

SEQ ID NO: 14656 - RNA, 22 nt, synthetic construct
  source 1..22: mol_type = other RNA
tggggtagggaaatggagctta

SEQ ID NO: 14657 - RNA, 22 nt, synthetic construct
  source 1..22: mol_type = other RNA
tggtgtcgaggttattgtaata

SEQ ID NO: 14658 - RNA, 22 nt, synthetic construct
  source 1..22: mol_type = other RNA
tgtaataagggtggggtaggga

SEQ ID NO: 14659 - RNA, 22 nt, synthetic construct
  source 1..22: mol_type = other RNA
tgtcgaggttattgtaataagg

SEQ ID NO: 14660 - RNA, 22 nt, synthetic construct
  source 1..22: mol_type = other RNA
ttacaataacctcgacaccaac

SEQ ID NO: 14661 - RNA, 22 nt, synthetic construct
  source 1..22: mol_type = other RNA
ttagtttatcttcccacggact

SEQ ID NO: 14662 - RNA, 22 nt, synthetic construct
  source 1..22: mol_type = other RNA
ttatcttcccacggactagagt

SEQ ID NO: 14663 - RNA, 22 nt, synthetic construct
  source 1..22: mol_type = other RNA
ttattacaataacctcgacacc

SEQ ID NO: 14664 - RNA, 22 nt, synthetic construct
  source 1..22: mol_type = other RNA
ttattgtaataagggtggggta

SEQ ID NO: 14665 - RNA, 22 nt, synthetic construct
  source 1..22: mol_type = other RNA
ttcccacggactagagttggtg

SEQ ID NO: 14666 - RNA, 22 nt, synthetic construct
  source 1..22: mol_type = other RNA
ttccctaccccacccttattac

SEQ ID NO: 14667 - RNA, 22 nt, synthetic construct
  source 1..22: mol_type = other RNA
ttggtgtcgaggttattgtaat

SEQ ID NO: 14668 - RNA, 22 nt, synthetic construct
  source 1..22: mol_type = other RNA
ttgtaataagggtggggtaggg

SEQ ID NO: 14669 - RNA, 22 nt, synthetic construct
  source 1..22: mol_type = other RNA
tttatcttcccacggactagag

SEQ ID NO: 14670 - RNA, 22 nt, synthetic construct
  source 1..22: mol_type = other RNA
tttccctaccccacccttatta

SEQ ID NO: 14671 - RNA, 20 nt, synthetic construct
  source 1..20: mol_type = other RNA
aaaaaagcagttttcttctg

SEQ ID NO: 14672 - RNA, 20 nt, synthetic construct
  source 1..20: mol_type = other RNA
aaaaaatgcataatgaattt

SEQ ID NO: 14673 - RNA, 20 nt, synthetic construct
  source 1..20: mol_type = other RNA
aaaaagaaccaccccacaaa

SEQ ID NO: 14674 - RNA, 20 nt, synthetic construct
  source 1..20: mol_type = other RNA
aaaaagagaaaaccatcaat

SEQ ID NO: 14675 - RNA, 20 nt, synthetic construct
  source 1..20: mol_type = other RNA
aaaaagcagttttcttctga

SEQ ID NO: 14676 - RNA, 20 nt, synthetic construct
  source 1..20: mol_type = other RNA
aaaaagcatttggtgttaaa

SEQ ID NO: 14677 - RNA, 20 nt, synthetic construct
  source 1..20: mol_type = other RNA
aaaaagctcagaatagttaa

SEQ ID NO: 14678 - RNA, 20 nt, synthetic construct
  source 1..20: mol_type = other RNA
aaaaagctgttaaattgagg

SEQ ID NO: 14679 - RNA, 20 nt, synthetic construct
  source 1..20: mol_type = other RNA
aaaaagggagatgttgccta

SEQ ID NO: 14680 - RNA, 20 nt, synthetic construct
  source 1..20: mol_type = other RNA
aaaaatgaaaaagctgttaa

SEQ ID NO: 14681 - RNA, 20 nt, synthetic construct
  source 1..20: mol_type = other RNA
aaaaatgataagtagtgata

SEQ ID NO: 14682 - RNA, 20 nt, synthetic construct
  source 1..20: mol_type = other RNA
aaaaatgcataatgaatttt

SEQ ID NO: 14683 - RNA, 20 nt, synthetic construct
  source 1..20: mol_type = other RNA
aaaaatgctccaaaaatgat

SEQ ID NO: 14684 - RNA, 20 nt, synthetic construct
  source 1..20: mol_type = other RNA
aaaaatggtttgttggactt

SEQ ID NO: 14685 - RNA, 20 nt, synthetic construct
  source 1..20: mol_type = other RNA
aaaaattcagttctttagtc

SEQ ID NO: 14686 - RNA, 20 nt, synthetic construct
  source 1..20: mol_type = other RNA
aaaaattttagcttttgctt

SEQ ID NO: 14687 - RNA, 20 nt, synthetic construct
  source 1..20: mol_type = other RNA
aaaacaaaacaagcagttaa

SEQ ID NO: 14688 - RNA, 20 nt, synthetic construct
  source 1..20: mol_type = other RNA
aaaacaagcagttaaatgaa

SEQ ID NO: 14689 - RNA, 20 nt, synthetic construct
  source 1..20: mol_type = other RNA
aaaacaatcacaaagtaagt

SEQ ID NO: 14690 - RNA, 20 nt, synthetic construct
  source 1..20: mol_type = other RNA
aaaaccatcaatgtccacgt

SEQ ID NO: 14691 - RNA, 20 nt, synthetic construct
  source 1..20: mol_type = other RNA
aaaactcaggtgatcatgct

SEQ ID NO: 14692 - RNA, 20 nt, synthetic construct
  source 1..20: mol_type = other RNA
aaaactgcttttttaaaagg

SEQ ID NO: 14693 - RNA, 20 nt, synthetic construct
  source 1..20: mol_type = other RNA
aaaacttgtaggacagaaat

SEQ ID NO: 14694 - RNA, 20 nt, synthetic construct
  source 1..20: mol_type = other RNA
aaaagaaccaccccacaaag

SEQ ID NO: 14695 - RNA, 20 nt, synthetic construct
  source 1..20: mol_type = other RNA
aaaagagaaaaccatcaatg

SEQ ID NO: 14696 - RNA, 20 nt, synthetic construct
  source 1..20: mol_type = other RNA
aaaagataacactaaagaca

SEQ ID NO: 14697 - RNA, 20 nt, synthetic construct
  source 1..20: mol_type = other RNA
aaaagcactgctgggtaaga

SEQ ID NO: 14698 - RNA, 20 nt, synthetic construct
  source 1..20: mol_type = other RNA
aaaagcagcaagggtagcat

SEQ ID NO: 14699 - RNA, 20 nt, synthetic construct
  source 1..20: mol_type = other RNA
aaaagcagttttcttctgac

SEQ ID NO: 14700 - RNA, 20 nt, synthetic construct
  source 1..20: mol_type = other RNA
aaaagcatttggtgttaaaa

SEQ ID NO: 14701 - RNA, 20 nt, synthetic construct
  source 1..20: mol_type = other RNA
aaaagctcagaatagttaag

SEQ ID NO: 14702 - RNA, 20 nt, synthetic construct
  source 1..20: mol_type = other RNA
aaaagctgaagctctctggc

SEQ ID NO: 14703 - RNA, 20 nt, synthetic construct
  source 1..20: mol_type = other RNA
aaaagctgttaaattgagga

SEQ ID NO: 14704 - RNA, 20 nt, synthetic construct
  source 1..20: mol_type = other RNA
aaaagggagatgttgcctaa

SEQ ID NO: 14705 - RNA, 20 nt, synthetic construct
  source 1..20: mol_type = other RNA
aaaagggcagtttgggtcat

SEQ ID NO: 14706 - RNA, 20 nt, synthetic construct
  source 1..20: mol_type = other RNA
aaaagtggctggtatgacta

SEQ ID NO: 14707 - RNA, 20 nt, synthetic construct
  source 1..20: mol_type = other RNA
aaaatcaagataaacattta

SEQ ID NO: 14708 - RNA, 20 nt, synthetic construct
  source 1..20: mol_type = other RNA
aaaatgaaaaagctgttaaa

SEQ ID NO: 14709 - RNA, 20 nt, synthetic construct
  source 1..20: mol_type = other RNA
aaaatgacaggtgaaactcc

SEQ ID NO: 14710 - RNA, 20 nt, synthetic construct
  source 1..20: mol_type = other RNA
aaaatgataagtagtgataa

SEQ ID NO: 14711 - RNA, 20 nt, synthetic construct
  source 1..20: mol_type = other RNA
aaaatgcataatgaatttta

SEQ ID NO: 14712 - RNA, 20 nt, synthetic construct
  source 1..20: mol_type = other RNA
aaaatgctccaaaaatgata

SEQ ID NO: 14713 - RNA, 20 nt, synthetic construct
  source 1..20: mol_type = other RNA
aaaatgggatcaagtatgag

SEQ ID NO: 14714 - RNA, 20 nt, synthetic construct
  source 1..20: mol_type = other RNA
aaaatggtttgttggactta

SEQ ID NO: 14715 - RNA, 20 nt, synthetic construct
  source 1..20: mol_type = other RNA
aaaatgtcaaaccataaaga

SEQ ID NO: 14716 - RNA, 20 nt, synthetic construct
  source 1..20: mol_type = other RNA
aaaatgttggtattataatt

SEQ ID NO: 14717 - RNA, 20 nt, synthetic construct
  source 1..20: mol_type = other RNA
aaaattcagttctttagtca

SEQ ID NO: 14718 - RNA, 20 nt, synthetic construct
  source 1..20: mol_type = other RNA
aaaattttagcttttgcttg

SEQ ID NO: 14719 - RNA, 20 nt, synthetic construct
  source 1..20: mol_type = other RNA
aaacaaaacaagcagttaaa

SEQ ID NO: 14720 - RNA, 20 nt, synthetic construct
  source 1..20: mol_type = other RNA
aaacaagcagttaaatgaaa

SEQ ID NO: 14721 - RNA, 20 nt, synthetic construct
  source 1..20: mol_type = other RNA
aaacaatcacaaagtaagtt

SEQ ID NO: 14722 - RNA, 20 nt, synthetic construct
  source 1..20: mol_type = other RNA
aaacacttgattggaggagc

SEQ ID NO: 14723 - RNA, 20 nt, synthetic construct
  source 1..20: mol_type = other RNA
aaacagtacaagccagtaat

SEQ ID NO: 14724 - RNA, 20 nt, synthetic construct
  source 1..20: mol_type = other RNA
aaacatttaagaacgtgaac

SEQ ID NO: 14725 - RNA, 20 nt, synthetic construct
  source 1..20: mol_type = other RNA
aaaccagacagattggttcc

SEQ ID NO: 14726 - RNA, 20 nt, synthetic construct
  source 1..20: mol_type = other RNA
aaaccaggggtgtccaatct

SEQ ID NO: 14727 - RNA, 20 nt, synthetic construct
  source 1..20: mol_type = other RNA
aaaccagtgcttccctccct

SEQ ID NO: 14728 - RNA, 20 nt, synthetic construct
  source 1..20: mol_type = other RNA
aaaccataaagacatttaca

SEQ ID NO: 14729 - RNA, 20 nt, synthetic construct
  source 1..20: mol_type = other RNA
aaaccatcaatgtccacgta

SEQ ID NO: 14730 - RNA, 20 nt, synthetic construct
  source 1..20: mol_type = other RNA
aaaccatttttaaagatgtg

SEQ ID NO: 14731 - RNA, 20 nt, synthetic construct
  source 1..20: mol_type = other RNA
aaactcaggtgatcatgctt

SEQ ID NO: 14732 - RNA, 20 nt, synthetic construct
  source 1..20: mol_type = other RNA
aaactcattaacgcttgctt

SEQ ID NO: 14733 - RNA, 20 nt, synthetic construct
  source 1..20: mol_type = other RNA
aaactccattactggcttgt

SEQ ID NO: 14734 - RNA, 20 nt, synthetic construct
  source 1..20: mol_type = other RNA
aaactcctaaaactttaaga

SEQ ID NO: 14735 - RNA, 20 nt, synthetic construct
  source 1..20: mol_type = other RNA
aaactgcccttttaaaaaag

SEQ ID NO: 14736 - RNA, 20 nt, synthetic construct
  source 1..20: mol_type = other RNA
aaactgctcaggagtcagaa

SEQ ID NO: 14737 - RNA, 20 nt, synthetic construct
  source 1..20: mol_type = other RNA
aaactgcttttttaaaaggg

SEQ ID NO: 14738 - RNA, 20 nt, synthetic construct
  source 1..20: mol_type = other RNA
aaactgttacaggagctaca

SEQ ID NO: 14739 - RNA, 20 nt, synthetic construct
  source 1..20: mol_type = other RNA
aaacttgtaggacagaaatt

SEQ ID NO: 14740 - RNA, 20 nt, synthetic construct
  source 1..20: mol_type = other RNA
aaactttaagaaagtttacg

SEQ ID NO: 14741 - RNA, 20 nt, synthetic construct
  source 1..20: mol_type = other RNA
aaagaaccaccccacaaaga

SEQ ID NO: 14742 - RNA, 20 nt, synthetic construct
  source 1..20: mol_type = other RNA
aaagacagagacagcaattt

SEQ ID NO: 14743 - RNA, 20 nt, synthetic construct
  source 1..20: mol_type = other RNA
aaagacatttacatgtcgct

SEQ ID NO: 14744 - RNA, 20 nt, synthetic construct
  source 1..20: mol_type = other RNA
aaagagaaaaccatcaatgt

SEQ ID NO: 14745 - RNA, 20 nt, synthetic construct
  source 1..20: mol_type = other RNA
aaagataacactaaagacag

SEQ ID NO: 14746 - RNA, 20 nt, synthetic construct
  source 1..20: mol_type = other RNA
aaagatatatgacgtctcta

SEQ ID NO: 14747 - RNA, 20 nt, synthetic construct
  source 1..20: mol_type = other RNA
aaagatgtgcctgccttgga

SEQ ID NO: 14748 - RNA, 20 nt, synthetic construct
  source 1..20: mol_type = other RNA
aaagattggacacccctggt

SEQ ID NO: 14749 - RNA, 20 nt, synthetic construct
  source 1..20: mol_type = other RNA
aaagcaagcgttaatgagtt

SEQ ID NO: 14750 - RNA, 20 nt, synthetic construct
  source 1..20: mol_type = other RNA
aaagcactgctgggtaagag

SEQ ID NO: 14751 - RNA, 20 nt, synthetic construct
  source 1..20: mol_type = other RNA
aaagcagcaagggtagcatt

SEQ ID NO: 14752 - RNA, 20 nt, synthetic construct
  source 1..20: mol_type = other RNA
aaagcagtagtcaagatcac

SEQ ID NO: 14753 - RNA, 20 nt, synthetic construct
  source 1..20: mol_type = other RNA
aaagcagttttcttctgact

SEQ ID NO: 14754 - RNA, 20 nt, synthetic construct
  source 1..20: mol_type = other RNA
aaagcatgatcacctgagtt

SEQ ID NO: 14755 - RNA, 20 nt, synthetic construct
  source 1..20: mol_type = other RNA
aaagcatttggtgttaaaat

SEQ ID NO: 14756 - RNA, 20 nt, synthetic construct
  source 1..20: mol_type = other RNA
aaagctaagtccaacaaacc

SEQ ID NO: 14757 - RNA, 20 nt, synthetic construct
  source 1..20: mol_type = other RNA
aaagctagtgctatgtctga

SEQ ID NO: 14758 - RNA, 20 nt, synthetic construct
  source 1..20: mol_type = other RNA
aaagctcagaatagttaagg

SEQ ID NO: 14759 - RNA, 20 nt, synthetic construct
  source 1..20: mol_type = other RNA
aaagctgaagctctctggcc

SEQ ID NO: 14760 - RNA, 20 nt, synthetic construct
  source 1..20: mol_type = other RNA
aaagctgtcctgggtcccat

SEQ ID NO: 14761 - RNA, 20 nt, synthetic construct
  source 1..20: mol_type = other RNA
aaagctgttaaattgaggaa

SEQ ID NO: 14762 - RNA, 20 nt, synthetic construct
  source 1..20: mol_type = other RNA
aaaggaagatagagcatgaa

SEQ ID NO: 14763 - RNA, 20 nt, synthetic construct
  source 1..20: mol_type = other RNA
aaagggagatgttgcctaac

SEQ ID NO: 14764 - RNA, 20 nt, synthetic construct
  source 1..20: mol_type = other RNA
aaagggcagtttgggtcata

SEQ ID NO: 14765 - RNA, 20 nt, synthetic construct
  source 1..20: mol_type = other RNA
aaaggggagatgacatttga

SEQ ID NO: 14766 - RNA, 20 nt, synthetic construct
  source 1..20: mol_type = other RNA
aaaggggtagagagcctggg

SEQ ID NO: 14767 - RNA, 20 nt, synthetic construct
  source 1..20: mol_type = other RNA
aaagtaagttttatcctgag

SEQ ID NO: 14768 - RNA, 20 nt, synthetic construct
  source 1..20: mol_type = other RNA
aaagtctatccagggacctt

SEQ ID NO: 14769 - RNA, 20 nt, synthetic construct
  source 1..20: mol_type = other RNA
aaagtggctggtatgactaa

SEQ ID NO: 14770 - RNA, 20 nt, synthetic construct
  source 1..20: mol_type = other RNA
aaagtgtagcatcaggttaa

SEQ ID NO: 14771 - RNA, 20 nt, synthetic construct
  source 1..20: mol_type = other RNA
aaagttggctagacatcaga

SEQ ID NO: 14772 - RNA, 20 nt, synthetic construct
  source 1..20: mol_type = other RNA
aaataaaagctgaagctctc

SEQ ID NO: 14773 - RNA, 20 nt, synthetic construct
  source 1..20: mol_type = other RNA
aaatacctctcatttctgtt

SEQ ID NO: 14774 - RNA, 20 nt, synthetic construct
  source 1..20: mol_type = other RNA
aaatatgacctctctcctga

SEQ ID NO: 14775 - RNA, 20 nt, synthetic construct
  source 1..20: mol_type = other RNA
aaatcaagataaacatttaa

SEQ ID NO: 14776 - RNA, 20 nt, synthetic construct
  source 1..20: mol_type = other RNA
aaatcagcaatgacaacaac

SEQ ID NO: 14777 - RNA, 20 nt, synthetic construct
  source 1..20: mol_type = other RNA
aaatcatagagacgtcatat

SEQ ID NO: 14778 - RNA, 20 nt, synthetic construct
  source 1..20: mol_type = other RNA
aaatccaaactcattaacgc

SEQ ID NO: 14779 - RNA, 20 nt, synthetic construct
  source 1..20: mol_type = other RNA
aaatgaaaaagctgttaaat

SEQ ID NO: 14780 - RNA, 20 nt, synthetic construct
  source 1..20: mol_type = other RNA
aaatgaaatgtaatgggcca

SEQ ID NO: 14781 - RNA, 20 nt, synthetic construct
  source 1..20: mol_type = other RNA
aaatgaacccagcctaaatt

SEQ ID NO: 14782 - RNA, 20 nt, synthetic construct
  source 1..20: mol_type = other RNA
aaatgacaggtgaaactcca

SEQ ID NO: 14783 - RNA, 20 nt, synthetic construct
  source 1..20: mol_type = other RNA
aaatgagaggtatttagagg

SEQ ID NO: 14784 - RNA, 20 nt, synthetic construct
  source 1..20: mol_type = other RNA
aaatgataagtagtgataat

SEQ ID NO: 14785 - RNA, 20 nt, synthetic construct
  source 1..20: mol_type = other RNA
aaatgcataatgaattttag

SEQ ID NO: 14786 - RNA, 20 nt, synthetic construct
  source 1..20: mol_type = other RNA
aaatgctccaaaaatgataa

SEQ ID NO: 14787 - RNA, 20 nt, synthetic construct
  source 1..20: mol_type = other RNA
aaatggaaaatgggatcaag

SEQ ID NO: 14788 - RNA, 20 nt, synthetic construct
  source 1..20: mol_type = other RNA
aaatggagtgagcgacatgt

SEQ ID NO: 14789 - RNA, 20 nt, synthetic construct
  source 1..20: mol_type = other RNA
aaatgggatcaagtatgagt

SEQ ID NO: 14790 - RNA, 20 nt, synthetic construct
  source 1..20: mol_type = other RNA
aaatggtataaaactcaggt

SEQ ID NO: 14791 - RNA, 20 nt, synthetic construct
  source 1..20: mol_type = other RNA
aaatggtttgttggacttag

SEQ ID NO: 14792 - RNA, 20 nt, synthetic construct
  source 1..20: mol_type = other RNA
aaatgtaatgggccagagag

SEQ ID NO: 14793 - RNA, 20 nt, synthetic construct
  source 1..20: mol_type = other RNA
aaatgtcaaaccataaagac

SEQ ID NO: 14794 - RNA, 20 nt, synthetic construct
  source 1..20: mol_type = other RNA
aaatgtcatctcccctttgg

SEQ ID NO: 14795 - RNA, 20 nt, synthetic construct
  source 1..20: mol_type = other RNA
aaatgttggtattataattc

SEQ ID NO: 14796 - RNA, 20 nt, synthetic construct
  source 1..20: mol_type = other RNA
aaattaaggcttgagctggg

SEQ ID NO: 14797 - RNA, 20 nt, synthetic construct
  source 1..20: mol_type = other RNA
aaattaccttaactattctg

SEQ ID NO: 14798 - RNA, 20 nt, synthetic construct
  source 1..20: mol_type = other RNA
aaattcagttctttagtcat

SEQ ID NO: 14799 - RNA, 20 nt, synthetic construct
  source 1..20: mol_type = other RNA
aaattgaggaaagtctatcc

SEQ ID NO: 14800 - RNA, 20 nt, synthetic construct
  source 1..20: mol_type = other RNA
aaattgctgtctctgtcttt

SEQ ID NO: 14801 - RNA, 20 nt, synthetic construct
  source 1..20: mol_type = other RNA
aaatttaggctgggttcatt

SEQ ID NO: 14802 - RNA, 20 nt, synthetic construct
  source 1..20: mol_type = other RNA
aaatttctgtcctacaagtt

SEQ ID NO: 14803 - RNA, 20 nt, synthetic construct
  source 1..20: mol_type = other RNA
aaattttagcttttgcttga

SEQ ID NO: 14804 - RNA, 20 nt, synthetic construct
  source 1..20: mol_type = other RNA
aacaaaacaagcagttaaat

SEQ ID NO: 14805 - RNA, 20 nt, synthetic construct
  source 1..20: mol_type = other RNA
aacaaaccatttttaaagat

SEQ ID NO: 14806 - RNA, 20 nt, synthetic construct
  source 1..20: mol_type = other RNA
aacaaatggaaaatgggatc

SEQ ID NO: 14807 - RNA, 20 nt, synthetic construct
  source 1..20: mol_type = other RNA
aacaacagaccatggaaggc

SEQ ID NO: 14808 - RNA, 20 nt, synthetic construct
  source 1..20: mol_type = other RNA
aacaaccccagaattactat

SEQ ID NO: 14809 - RNA, 20 nt, synthetic construct
  source 1..20: mol_type = other RNA
aacaagatgtaagatggatc

SEQ ID NO: 14810 - RNA, 20 nt, synthetic construct
  source 1..20: mol_type = other RNA
aacaagcagttaaatgaaat

SEQ ID NO: 14811 - RNA, 20 nt, synthetic construct
  source 1..20: mol_type = other RNA
aacaagtccggggctacagc

SEQ ID NO: 14812 - RNA, 20 nt, synthetic construct
  source 1..20: mol_type = other RNA
aacaatcacaaagtaagttt

SEQ ID NO: 14813 - RNA, 20 nt, synthetic construct
  source 1..20: mol_type = other RNA
aacaccaaatgctttttata

SEQ ID NO: 14814 - RNA, 20 nt, synthetic construct
  source 1..20: mol_type = other RNA
aacactaaagacagagacag

SEQ ID NO: 14815 - RNA, 20 nt, synthetic construct
  source 1..20: mol_type = other RNA
aacacttgattggaggagct

SEQ ID NO: 14816 - RNA, 20 nt, synthetic construct
  source 1..20: mol_type = other RNA
aacagaaatgagaggtattt

SEQ ID NO: 14817 - RNA, 20 nt, synthetic construct
  source 1..20: mol_type = other RNA
aacagaattcatcctgtaaa

SEQ ID NO: 14818 - RNA, 20 nt, synthetic construct
  source 1..20: mol_type = other RNA
aacagaccatggaaggcatg

SEQ ID NO: 14819 - RNA, 20 nt, synthetic construct
  source 1..20: mol_type = other RNA
aacagctttttcatttttca

SEQ ID NO: 14820 - RNA, 20 nt, synthetic construct
  source 1..20: mol_type = other RNA
aacagtacaagccagtaatg

SEQ ID NO: 14821 - RNA, 20 nt, synthetic construct
  source 1..20: mol_type = other RNA
aacagtgaaagcaagcgtta

SEQ ID NO: 14822 - RNA, 20 nt, synthetic construct
  source 1..20: mol_type = other RNA
aacagtttaatggaatctca

SEQ ID NO: 14823 - RNA, 20 nt, synthetic construct
  source 1..20: mol_type = other RNA
aacatctccctttttcttcc

SEQ ID NO: 14824 - RNA, 20 nt, synthetic construct
  source 1..20: mol_type = other RNA
aacatttaagaacgtgaact

SEQ ID NO: 14825 - RNA, 20 nt, synthetic construct
  source 1..20: mol_type = other RNA
aaccaatctgtctggtttcg

SEQ ID NO: 14826 - RNA, 20 nt, synthetic construct
  source 1..20: mol_type = other RNA
aaccaccccacaaagatata

SEQ ID NO: 14827 - RNA, 20 nt, synthetic construct
  source 1..20: mol_type = other RNA
aaccagacagattggttcca

SEQ ID NO: 14828 - RNA, 20 nt, synthetic construct
  source 1..20: mol_type = other RNA
aaccaggggtgtccaatctt

SEQ ID NO: 14829 - RNA, 20 nt, synthetic construct
  source 1..20: mol_type = other RNA
aaccagtgcttccctccctc

SEQ ID NO: 14830 - RNA, 20 nt, synthetic construct
  source 1..20: mol_type = other RNA
aaccataaagacatttacat

SEQ ID NO: 14831 - RNA, 20 nt, synthetic construct
  source 1..20: mol_type = other RNA
aaccatcaatgtccacgtat

SEQ ID NO: 14832 - RNA, 20 nt, synthetic construct
  source 1..20: mol_type = other RNA
aaccatttttaaagatgtgc

SEQ ID NO: 14833 - RNA, 20 nt, synthetic construct
  source 1..20: mol_type = other RNA
aacccagcctaaatttctgt

SEQ ID NO: 14834 - RNA, 20 nt, synthetic construct
  source 1..20: mol_type = other RNA
aaccccagaattactatgac

SEQ ID NO: 14835 - RNA, 20 nt, synthetic construct
  source 1..20: mol_type = other RNA
aacccgcgggccgcatggga

SEQ ID NO: 14836 - RNA, 20 nt, synthetic construct
  source 1..20: mol_type = other RNA
aacctcagatccaattctct

SEQ ID NO: 14837 - RNA, 20 nt, synthetic construct
  source 1..20: mol_type = other RNA
aacctgatgctacactttgg

SEQ ID NO: 14838 - RNA, 20 nt, synthetic construct
  source 1..20: mol_type = other RNA
aacgagactgcggattatca

SEQ ID NO: 14839 - RNA, 20 nt, synthetic construct
  source 1..20: mol_type = other RNA
aacgcttgctttcactgttg

SEQ ID NO: 14840 - RNA, 20 nt, synthetic construct
  source 1..20: mol_type = other RNA
aacgtgaactagggaggaat

SEQ ID NO: 14841 - RNA, 20 nt, synthetic construct
  source 1..20: mol_type = other RNA
aactagggaggaataaaagc

SEQ ID NO: 14842 - RNA, 20 nt, synthetic construct
  source 1..20: mol_type = other RNA
aactatgtagctcctgtaac

SEQ ID NO: 14843 - RNA, 20 nt, synthetic construct
  source 1..20: mol_type = other RNA
aactattctgagctttttga

SEQ ID NO: 14844 - RNA, 20 nt, synthetic construct
  source 1..20: mol_type = other RNA
aactcaagatatgatgctta

SEQ ID NO: 14845 - RNA, 20 nt, synthetic construct
  source 1..20: mol_type = other RNA
aactcaggtgatcatgcttt

SEQ ID NO: 14846 - RNA, 20 nt, synthetic construct
  source 1..20: mol_type = other RNA
aactcattaacgcttgcttt

SEQ ID NO: 14847 - RNA, 20 nt, synthetic construct
  source 1..20: mol_type = other RNA
aactccattactggcttgta

SEQ ID NO: 14848 - RNA, 20 nt, synthetic construct
  source 1..20: mol_type = other RNA
aactcctaaaactttaagaa

SEQ ID NO: 14849 - RNA, 20 nt, synthetic construct
  source 1..20: mol_type = other RNA
aactctcactcatacttgat

SEQ ID NO: 14850 - RNA, 20 nt, synthetic construct
  source 1..20: mol_type = other RNA
aactgatctcagatgcctgt

SEQ ID NO: 14851 - RNA, 20 nt, synthetic construct
  source 1..20: mol_type = other RNA
aactgcaattcattccatgt

SEQ ID NO: 14852 - RNA, 20 nt, synthetic construct
  source 1..20: mol_type = other RNA
aactgcccttttaaaaaagc

SEQ ID NO: 14853 - RNA, 20 nt, synthetic construct
  source 1..20: mol_type = other RNA
aactgctcaggagtcagaag

SEQ ID NO: 14854 - RNA, 20 nt, synthetic construct
  source 1..20: mol_type = other RNA
aactgcttttttaaaagggc

SEQ ID NO: 14855 - RNA, 20 nt, synthetic construct
  source 1..20: mol_type = other RNA
aactggtaagaacagaaatg

SEQ ID NO: 14856 - RNA, 20 nt, synthetic construct
  source 1..20: mol_type = other RNA
aactgtcttgggccacatat

SEQ ID NO: 14857 - RNA, 20 nt, synthetic construct
  source 1..20: mol_type = other RNA
aactgtggacagtatagctg

SEQ ID NO: 14858 - RNA, 20 nt, synthetic construct
  source 1..20: mol_type = other RNA
aactgttacaggagctacat

SEQ ID NO: 14859 - RNA, 20 nt, synthetic construct
  source 1..20: mol_type = other RNA
aacttactttgtgattgttt

SEQ ID NO: 14860 - RNA, 20 nt, synthetic construct
  source 1..20: mol_type = other RNA
aacttgaatgaagaataggt

SEQ ID NO: 14861 - RNA, 20 nt, synthetic construct
  source 1..20: mol_type = other RNA
aacttgctgtaaacagtaca

SEQ ID NO: 14862 - RNA, 20 nt, synthetic construct
  source 1..20: mol_type = other RNA
aacttgtaggacagaaattt

SEQ ID NO: 14863 - RNA, 20 nt, synthetic construct
  source 1..20: mol_type = other RNA
aactttaagaaagtttacga

SEQ ID NO: 14864 - RNA, 20 nt, synthetic construct
  source 1..20: mol_type = other RNA
aactttaagtaaatggagtg

SEQ ID NO: 14865 - RNA, 20 nt, synthetic construct
  source 1..20: mol_type = other RNA
aagaaaaagggagatgttgc

SEQ ID NO: 14866 - RNA, 20 nt, synthetic construct
  source 1..20: mol_type = other RNA
aagaaaactgcttttttaaa

SEQ ID NO: 14867 - RNA, 20 nt, synthetic construct
  source 1..20: mol_type = other RNA
aagaacagaaatgagaggta

SEQ ID NO: 14868 - RNA, 20 nt, synthetic construct
  source 1..20: mol_type = other RNA
aagaaccaccccacaaagat

SEQ ID NO: 14869 - RNA, 20 nt, synthetic construct
  source 1..20: mol_type = other RNA
aagaacgtgaactagggagg

SEQ ID NO: 14870 - RNA, 20 nt, synthetic construct
  source 1..20: mol_type = other RNA
aagaactgtcttgggccaca

SEQ ID NO: 14871 - RNA, 20 nt, synthetic construct
  source 1..20: mol_type = other RNA
aagaataggtctgtgtgata

SEQ ID NO: 14872 - RNA, 20 nt, synthetic construct
  source 1..20: mol_type = other RNA
aagacactattccttcaaaa

SEQ ID NO: 14873 - RNA, 20 nt, synthetic construct
  source 1..20: mol_type = other RNA
aagacagagacagcaatttg

SEQ ID NO: 14874 - RNA, 20 nt, synthetic construct
  source 1..20: mol_type = other RNA
aagacagttcttgcagtgtg

SEQ ID NO: 14875 - RNA, 20 nt, synthetic construct
  source 1..20: mol_type = other RNA
aagacatttacatgtcgctc

SEQ ID NO: 14876 - RNA, 20 nt, synthetic construct
  source 1..20: mol_type = other RNA
aagacggtcagggacagaat

SEQ ID NO: 14877 - RNA, 20 nt, synthetic construct
  source 1..20: mol_type = other RNA
aagagaaaaccatcaatgtc

SEQ ID NO: 14878 - RNA, 20 nt, synthetic construct
  source 1..20: mol_type = other RNA
aagagagggagaaagctagt

SEQ ID NO: 14879 - RNA, 20 nt, synthetic construct
  source 1..20: mol_type = other RNA
aagagtcaagccccagctca

SEQ ID NO: 14880 - RNA, 20 nt, synthetic construct
  source 1..20: mol_type = other RNA
aagataaacatttaagaacg

SEQ ID NO: 14881 - RNA, 20 nt, synthetic construct
  source 1..20: mol_type = other RNA
aagataacactaaagacaga

SEQ ID NO: 14882 - RNA, 20 nt, synthetic construct
  source 1..20: mol_type = other RNA
aagatactgtattagcaata

SEQ ID NO: 14883 - RNA, 20 nt, synthetic construct
  source 1..20: mol_type = other RNA
aagatagagcatgaaaatga

SEQ ID NO: 14884 - RNA, 20 nt, synthetic construct
  source 1..20: mol_type = other RNA
aagatatatgacgtctctat

SEQ ID NO: 14885 - RNA, 20 nt, synthetic construct
  source 1..20: mol_type = other RNA
aagatatgatgcttagagct

SEQ ID NO: 14886 - RNA, 20 nt, synthetic construct
  source 1..20: mol_type = other RNA
aagatcaagagagggagaaa

SEQ ID NO: 14887 - RNA, 20 nt, synthetic construct
  source 1..20: mol_type = other RNA
aagatcacctggactgtgaa

SEQ ID NO: 14888 - RNA, 20 nt, synthetic construct
  source 1..20: mol_type = other RNA
aagatgcctggtagggatgc

SEQ ID NO: 14889 - RNA, 20 nt, synthetic construct
  source 1..20: mol_type = other RNA
aagatggatcaaaagataac

SEQ ID NO: 14890 - RNA, 20 nt, synthetic construct
  source 1..20: mol_type = other RNA
aagatgtaagatggatcaaa

SEQ ID NO: 14891 - RNA, 20 nt, synthetic construct
  source 1..20: mol_type = other RNA
aagatgtgcctgccttggac

SEQ ID NO: 14892 - RNA, 20 nt, synthetic construct
  source 1..20: mol_type = other RNA
aagattggacacccctggtt

SEQ ID NO: 14893 - RNA, 20 nt, synthetic construct
  source 1..20: mol_type = other RNA
aagatttaacctgatgctac

SEQ ID NO: 14894 - RNA, 20 nt, synthetic construct
  source 1..20: mol_type = other RNA
aagcaagcgttaatgagttt

SEQ ID NO: 14895 - RNA, 20 nt, synthetic construct
  source 1..20: mol_type = other RNA
aagcactgctgggtaagagt

SEQ ID NO: 14896 - RNA, 20 nt, synthetic construct
  source 1..20: mol_type = other RNA
aagcactggtttctcaagca

SEQ ID NO: 14897 - RNA, 20 nt, synthetic construct
  source 1..20: mol_type = other RNA
aagcagcaagggtagcattc

SEQ ID NO: 14898 - RNA, 20 nt, synthetic construct
  source 1..20: mol_type = other RNA
aagcagtagtcaagatcacc

SEQ ID NO: 14899 - RNA, 20 nt, synthetic construct
  source 1..20: mol_type = other RNA
aagcagttaaatgaaatgta

SEQ ID NO: 14900 - RNA, 20 nt, synthetic construct
  source 1..20: mol_type = other RNA
aagcagttttcttctgactc

SEQ ID NO: 14901 - RNA, 20 nt, synthetic construct
  source 1..20: mol_type = other RNA
aagcatcatatcttgagtta

SEQ ID NO: 14902 - RNA, 20 nt, synthetic construct
  source 1..20: mol_type = other RNA
aagcatgatcacctgagttt

SEQ ID NO: 14903 - RNA, 20 nt, synthetic construct
  source 1..20: mol_type = other RNA
aagcatttggtgttaaaatg

SEQ ID NO: 14904 - RNA, 20 nt, synthetic construct
  source 1..20: mol_type = other RNA
aagccagtaatggagtttca

SEQ ID NO: 14905 - RNA, 20 nt, synthetic construct
  source 1..20: mol_type = other RNA
aagccccagctcaagcctta

SEQ ID NO: 14906 - RNA, 20 nt, synthetic construct
  source 1..20: mol_type = other RNA
aagccgaaagattggacacc

SEQ ID NO: 14907 - RNA, 20 nt, synthetic construct
  source 1..20: mol_type = other RNA
aagccttaatttgtggtgga

SEQ ID NO: 14908 - RNA, 20 nt, synthetic construct
  source 1..20: mol_type = other RNA
aagcgttaatgagtttggat

SEQ ID NO: 14909 - RNA, 20 nt, synthetic construct
  source 1..20: mol_type = other RNA
aagctaagtccaacaaacca

SEQ ID NO: 14910 - RNA, 20 nt, synthetic construct
  source 1..20: mol_type = other RNA
aagctagtgctatgtctgaa

SEQ ID NO: 14911 - RNA, 20 nt, synthetic construct
  source 1..20: mol_type = other RNA
aagctatcacacaggcatct

SEQ ID NO: 14912 - RNA, 20 nt, synthetic construct
  source 1..20: mol_type = other RNA
aagctcagaatagttaaggt

SEQ ID NO: 14913 - RNA, 20 nt, synthetic construct
  source 1..20: mol_type = other RNA
aagctctctggcccattaca

SEQ ID NO: 14914 - RNA, 20 nt, synthetic construct
  source 1..20: mol_type = other RNA
aagctgaagctctctggccc

SEQ ID NO: 14915 - RNA, 20 nt, synthetic construct
  source 1..20: mol_type = other RNA
aagctgtcctgggtcccatg

SEQ ID NO: 14916 - RNA, 20 nt, synthetic construct
  source 1..20: mol_type = other RNA
aagctgttaaattgaggaaa

SEQ ID NO: 14917 - RNA, 20 nt, synthetic construct
  source 1..20: mol_type = other RNA
aaggaaaaaggataaaatga

SEQ ID NO: 14918 - RNA, 20 nt, synthetic construct
  source 1..20: mol_type = other RNA
aaggaaataaaagctgaagc

SEQ ID NO: 14919 - RNA, 20 nt, synthetic construct
  source 1..20: mol_type = other RNA
aaggaagatagagcatgaaa

SEQ ID NO: 14920 - RNA, 20 nt, synthetic construct
  source 1..20: mol_type = other RNA
aaggaatagtgtcttgtact

SEQ ID NO: 14921 - RNA, 20 nt, synthetic construct
  source 1..20: mol_type = other RNA
aaggcaggcacatctttaaa

SEQ ID NO: 14922 - RNA, 20 nt, synthetic construct
  source 1..20: mol_type = other RNA
aaggcatgaccaaaggggag

SEQ ID NO: 14923 - RNA, 20 nt, synthetic construct
  source 1..20: mol_type = other RNA
aaggcttgagctggggcttg

SEQ ID NO: 14924 - RNA, 20 nt, synthetic construct
  source 1..20: mol_type = other RNA
aagggagatgttgcctaacc

SEQ ID NO: 14925 - RNA, 20 nt, synthetic construct
  source 1..20: mol_type = other RNA
aagggcagtttgggtcatag

SEQ ID NO: 14926 - RNA, 20 nt, synthetic construct
  source 1..20: mol_type = other RNA
aaggggagatgacatttgaa

SEQ ID NO: 14927 - RNA, 20 nt, synthetic construct
  source 1..20: mol_type = other RNA
aaggggtagagagcctgggg

SEQ ID NO: 14928 - RNA, 20 nt, synthetic construct
  source 1..20: mol_type = other RNA
aagggtagcattccaaaaag

SEQ ID NO: 14929 - RNA, 20 nt, synthetic construct
  source 1..20: mol_type = other RNA
aagggtctcaaatggtataa

SEQ ID NO: 14930 - RNA, 20 nt, synthetic construct
  source 1..20: mol_type = other RNA
aaggtaatttaaatcagcaa

SEQ ID NO: 14931 - RNA, 20 nt, synthetic construct
  source 1..20: mol_type = other RNA
aaggtccctggatagacttt

SEQ ID NO: 14932 - RNA, 20 nt, synthetic construct
  source 1..20: mol_type = other RNA
aagtaaatggagtgagcgac

SEQ ID NO: 14933 - RNA, 20 nt, synthetic construct
  source 1..20: mol_type = other RNA
aagtaagttttatcctgagg

SEQ ID NO: 14934 - RNA, 20 nt, synthetic construct
  source 1..20: mol_type = other RNA
aagtacaacaaatggaaaat

SEQ ID NO: 14935 - RNA, 20 nt, synthetic construct
  source 1..20: mol_type = other RNA
aagtagtgataatccgcagt

SEQ ID NO: 14936 - RNA, 20 nt, synthetic construct
  source 1..20: mol_type = other RNA
aagtatgagtgagagttgct

SEQ ID NO: 14937 - RNA, 20 nt, synthetic construct
  source 1..20: mol_type = other RNA
aagtcacatggaatgaattg

SEQ ID NO: 14938 - RNA, 20 nt, synthetic construct
  source 1..20: mol_type = other RNA
aagtccaacaaaccattttt

SEQ ID NO: 14939 - RNA, 20 nt, synthetic construct
  source 1..20: mol_type = other RNA
aagtccggggctacagctat

SEQ ID NO: 14940 - RNA, 20 nt, synthetic construct
  source 1..20: mol_type = other RNA
aagtctatccagggacctta

SEQ ID NO: 14941 - RNA, 20 nt, synthetic construct
  source 1..20: mol_type = other RNA
aagtgaaaacttgtaggaca

SEQ ID NO: 14942 - RNA, 20 nt, synthetic construct
  source 1..20: mol_type = other RNA
aagtggctggtatgactaaa

SEQ ID NO: 14943 - RNA, 20 nt, synthetic construct
  source 1..20: mol_type = other RNA
aagtgtagcatcaggttaaa

SEQ ID NO: 14944 - RNA, 20 nt, synthetic construct
  source 1..20: mol_type = other RNA
aagtgtttccaggaagtgaa

SEQ ID NO: 14945 - RNA, 20 nt, synthetic construct
  source 1..20: mol_type = other RNA
aagttctgatatatttaact

SEQ ID NO: 14946 - RNA, 20 nt, synthetic construct
  source 1..20: mol_type = other RNA
aagttggctagacatcagag

SEQ ID NO: 14947 - RNA, 20 nt, synthetic construct
  source 1..20: mol_type = other RNA
aagttgtctaacccgcgggc

SEQ ID NO: 14948 - RNA, 20 nt, synthetic construct
  source 1..20: mol_type = other RNA
aagttttatcctgaggaatt

SEQ ID NO: 14949 - RNA, 20 nt, synthetic construct
  source 1..20: mol_type = other RNA
aagttttcacttcctggaaa

SEQ ID NO: 14950 - RNA, 20 nt, synthetic construct
  source 1..20: mol_type = other RNA
aataaaaattcagttcttta

SEQ ID NO: 14951 - RNA, 20 nt, synthetic construct
  source 1..20: mol_type = other RNA
aataaaagcactgctgggta

SEQ ID NO: 14952 - RNA, 20 nt, synthetic construct
  source 1..20: mol_type = other RNA
aataaaagctgaagctctct

SEQ ID NO: 14953 - RNA, 20 nt, synthetic construct
  source 1..20: mol_type = other RNA
aataccaacattttaacacc

SEQ ID NO: 14954 - RNA, 20 nt, synthetic construct
  source 1..20: mol_type = other RNA
aatacctctcatttctgttc

SEQ ID NO: 14955 - RNA, 20 nt, synthetic construct
  source 1..20: mol_type = other RNA
aatacgtggacattgatggt

SEQ ID NO: 14956 - RNA, 20 nt, synthetic construct
  source 1..20: mol_type = other RNA
aatactagaggagcaagtac

SEQ ID NO: 14957 - RNA, 20 nt, synthetic construct
  source 1..20: mol_type = other RNA
aatagaaaaattttagcttt

SEQ ID NO: 14958 - RNA, 20 nt, synthetic construct
  source 1..20: mol_type = other RNA
aataggtctgtgtgatacaa

SEQ ID NO: 14959 - RNA, 20 nt, synthetic construct
  source 1..20: mol_type = other RNA
aatagtgtcttgtactcctg

SEQ ID NO: 14960 - RNA, 20 nt, synthetic construct
  source 1..20: mol_type = other RNA
aatatatcagaacttgaatg

SEQ ID NO: 14961 - RNA, 20 nt, synthetic construct
  source 1..20: mol_type = other RNA
aatatgacctctctcctgaa

SEQ ID NO: 14962 - RNA, 20 nt, synthetic construct
  source 1..20: mol_type = other RNA
aatcaagataaacatttaag

SEQ ID NO: 14963 - RNA, 20 nt, synthetic construct
  source 1..20: mol_type = other RNA
aatcaagtgtttccaggaag

SEQ ID NO: 14964 - RNA, 20 nt, synthetic construct
  source 1..20: mol_type = other RNA
aatcacaaagtaagttttat

SEQ ID NO: 14965 - RNA, 20 nt, synthetic construct
  source 1..20: mol_type = other RNA
aatcagcaatgacaacaacc

SEQ ID NO: 14966 - RNA, 20 nt, synthetic construct
  source 1..20: mol_type = other RNA
aatcatagagacgtcatata

SEQ ID NO: 14967 - RNA, 20 nt, synthetic construct
  source 1..20: mol_type = other RNA
aatcatcctaacaagatgta

SEQ ID NO: 14968 - RNA, 20 nt, synthetic construct
  source 1..20: mol_type = other RNA
aatccaaactcattaacgct

SEQ ID NO: 14969 - RNA, 20 nt, synthetic construct
  source 1..20: mol_type = other RNA
aatccacagaacaagtccgg

SEQ ID NO: 14970 - RNA, 20 nt, synthetic construct
  source 1..20: mol_type = other RNA
aatcccagctaaggaaaaag

SEQ ID NO: 14971 - RNA, 20 nt, synthetic construct
  source 1..20: mol_type = other RNA
aatcctgcagattcaaatgt

SEQ ID NO: 14972 - RNA, 20 nt, synthetic construct
  source 1..20: mol_type = other RNA
aatctcacctccctaaaatt

SEQ ID NO: 14973 - RNA, 20 nt, synthetic construct
  source 1..20: mol_type = other RNA
aatctgcaggattaaaagca

SEQ ID NO: 14974 - RNA, 20 nt, synthetic construct
  source 1..20: mol_type = other RNA
aatctgtctggtttcgcgag

SEQ ID NO: 14975 - RNA, 20 nt, synthetic construct
  source 1..20: mol_type = other RNA
aatcttgagcattggaaaag

SEQ ID NO: 14976 - RNA, 20 nt, synthetic construct
  source 1..20: mol_type = other RNA
aatgaaaaagctgttaaatt

SEQ ID NO: 14977 - RNA, 20 nt, synthetic construct
  source 1..20: mol_type = other RNA
aatgaaatgtaatgggccag

SEQ ID NO: 14978 - RNA, 20 nt, synthetic construct
  source 1..20: mol_type = other RNA
aatgaacccagcctaaattt

SEQ ID NO: 14979 - RNA, 20 nt, synthetic construct
  source 1..20: mol_type = other RNA
aatgaagaataggtctgtgt

SEQ ID NO: 14980 - RNA, 20 nt, synthetic construct
  source 1..20: mol_type = other RNA
aatgaattgcagttacccaa

SEQ ID NO: 14981 - RNA, 20 nt, synthetic construct
  source 1..20: mol_type = other RNA
aatgaattttagggaggtga

SEQ ID NO: 14982 - RNA, 20 nt, synthetic construct
  source 1..20: mol_type = other RNA
aatgacaacaaccccagaat

SEQ ID NO: 14983 - RNA, 20 nt, synthetic construct
  source 1..20: mol_type = other RNA
aatgacaggtgaaactccat

SEQ ID NO: 14984 - RNA, 20 nt, synthetic construct
  source 1..20: mol_type = other RNA
aatgagaggtatttagagga

SEQ ID NO: 14985 - RNA, 20 nt, synthetic construct
  source 1..20: mol_type = other RNA
aatgataagtagtgataatc

SEQ ID NO: 14986 - RNA, 20 nt, synthetic construct
  source 1..20: mol_type = other RNA
aatgcataatgaattttagg

SEQ ID NO: 14987 - RNA, 20 nt, synthetic construct
  source 1..20: mol_type = other RNA
aatgctacccttgctgcttt

SEQ ID NO: 14988 - RNA, 20 nt, synthetic construct
  source 1..20: mol_type = other RNA
aatgctcaagattaataaaa

SEQ ID NO: 14989 - RNA, 20 nt, synthetic construct
  source 1..20: mol_type = other RNA
aatgctccaaaaatgataag

SEQ ID NO: 14990 - RNA, 20 nt, synthetic construct
  source 1..20: mol_type = other RNA
aatggaaaatgggatcaagt

SEQ ID NO: 14991 - RNA, 20 nt, synthetic construct
  source 1..20: mol_type = other RNA
aatggaatctcacctcccta

SEQ ID NO: 14992 - RNA, 20 nt, synthetic construct
  source 1..20: mol_type = other RNA
aatggagtgagcgacatgta

SEQ ID NO: 14993 - RNA, 20 nt, synthetic construct
  source 1..20: mol_type = other RNA
aatggagtttcacctgtcat

SEQ ID NO: 14994 - RNA, 20 nt, synthetic construct
  source 1..20: mol_type = other RNA
aatgggatcaagtatgagtg

SEQ ID NO: 14995 - RNA, 20 nt, synthetic construct
  source 1..20: mol_type = other RNA
aatgggccagagagcttcag

SEQ ID NO: 14996 - RNA, 20 nt, synthetic construct
  source 1..20: mol_type = other RNA
aatggtataaaactcaggtg

SEQ ID NO: 14997 - RNA, 20 nt, synthetic construct
  source 1..20: mol_type = other RNA
aatggtttgttggacttagc

SEQ ID NO: 14998 - RNA, 20 nt, synthetic construct
  source 1..20: mol_type = other RNA
aatgtaatgggccagagagc

SEQ ID NO: 14999 - RNA, 20 nt, synthetic construct
  source 1..20: mol_type = other RNA
aatgtcaaaccataaagaca

SEQ ID NO: 15000 - RNA, 20 nt, synthetic construct
  source 1..20: mol_type = other RNA
aatgtcatctcccctttggt

SEQ ID NO: 15001 - RNA, 20 nt, synthetic construct
  source 1..20: mol_type = other RNA
aatgtccacgtattctgtaa

SEQ ID NO: 15002 - RNA, 20 nt, synthetic construct
  source 1..20: mol_type = other RNA
aatgtgatgcataaggtccc

SEQ ID NO: 15003 - RNA, 20 nt, synthetic construct
  source 1..20: mol_type = other RNA
aatgttggtattataattcc

SEQ ID NO: 15004 - RNA, 20 nt, synthetic construct
  source 1..20: mol_type = other RNA
aattaaggcttgagctgggg

SEQ ID NO: 15005 - RNA, 20 nt, synthetic construct
  source 1..20: mol_type = other RNA
aattaccttaactattctga

SEQ ID NO: 15006 - RNA, 20 nt, synthetic construct
  source 1..20: mol_type = other RNA
aattactatgacccacgcag

SEQ ID NO: 15007 - RNA, 20 nt, synthetic construct
  source 1..20: mol_type = other RNA
aattcagttctttagtcata

SEQ ID NO: 15008 - RNA, 20 nt, synthetic construct
  source 1..20: mol_type = other RNA
aattcatcctgtaaaccagg

SEQ ID NO: 15009 - RNA, 20 nt, synthetic construct
  source 1..20: mol_type = other RNA
aattcattccatgtgacttc

SEQ ID NO: 15010 - RNA, 20 nt, synthetic construct
  source 1..20: mol_type = other RNA
aattcctcaggataaaactt

SEQ ID NO: 15011 - RNA, 20 nt, synthetic construct
  source 1..20: mol_type = other RNA
aattcgtaaactttcttaaa

SEQ ID NO: 15012 - RNA, 20 nt, synthetic construct
  source 1..20: mol_type = other RNA
aattctctgtaaagcagtag

SEQ ID NO: 15013 - RNA, 20 nt, synthetic construct
  source 1..20: mol_type = other RNA
aattctggggttgttgtcat

SEQ ID NO: 15014 - RNA, 20 nt, synthetic construct
  source 1..20: mol_type = other RNA
aattctgttctcgtgaatgt

SEQ ID NO: 15015 - RNA, 20 nt, synthetic construct
  source 1..20: mol_type = other RNA
aattgaggaaagtctatcca

SEQ ID NO: 15016 - RNA, 20 nt, synthetic construct
  source 1..20: mol_type = other RNA
aattgcaactgtggacagta

SEQ ID NO: 15017 - RNA, 20 nt, synthetic construct
  source 1..20: mol_type = other RNA
aattgcagttacccaaatca

SEQ ID NO: 15018 - RNA, 20 nt, synthetic construct
  source 1..20: mol_type = other RNA
aattgctgtctctgtcttta

SEQ ID NO: 15019 - RNA, 20 nt, synthetic construct
  source 1..20: mol_type = other RNA
aattggatctgaggttaggc

SEQ ID NO: 15020 - RNA, 20 nt, synthetic construct
  source 1..20: mol_type = other RNA
aatttaaatcagcaatgaca

SEQ ID NO: 15021 - RNA, 20 nt, synthetic construct
  source 1..20: mol_type = other RNA
aatttaggctgggttcattt

SEQ ID NO: 15022 - RNA, 20 nt, synthetic construct
  source 1..20: mol_type = other RNA
aatttctgtcctacaagttt

SEQ ID NO: 15023 - RNA, 20 nt, synthetic construct
  source 1..20: mol_type = other RNA
aatttgaattgcaactgtgg

SEQ ID NO: 15024 - RNA, 20 nt, synthetic construct
  source 1..20: mol_type = other RNA
aatttggaagctatcacaca

SEQ ID NO: 15025 - RNA, 20 nt, synthetic construct
  source 1..20: mol_type = other RNA
aatttgtggtggaaccaatc

SEQ ID NO: 15026 - RNA, 20 nt, synthetic construct
  source 1..20: mol_type = other RNA
aattttagcttttgcttgag

SEQ ID NO: 15027 - RNA, 20 nt, synthetic construct
  source 1..20: mol_type = other RNA
aattttagggaggtgagatt

SEQ ID NO: 15028 - RNA, 20 nt, synthetic construct
  source 1..20: mol_type = other RNA
acaaaacaagcagttaaatg

SEQ ID NO: 15029 - RNA, 20 nt, synthetic construct
  source 1..20: mol_type = other RNA
acaaaccatttttaaagatg

SEQ ID NO: 15030 - RNA, 20 nt, synthetic construct
  source 1..20: mol_type = other RNA
acaaactgctcaggagtcag

SEQ ID NO: 15031 - RNA, 20 nt, synthetic construct
  source 1..20: mol_type = other RNA
acaaagatatatgacgtctc

SEQ ID NO: 15032 - RNA, 20 nt, synthetic construct
  source 1..20: mol_type = other RNA
acaaagtaagttttatcctg

SEQ ID NO: 15033 - RNA, 20 nt, synthetic construct
  source 1..20: mol_type = other RNA
acaaatatgacctctctcct

SEQ ID NO: 15034 - RNA, 20 nt, synthetic construct
  source 1..20: mol_type = other RNA
acaaatgaacccagcctaaa

SEQ ID NO: 15035 - RNA, 20 nt, synthetic construct
  source 1..20: mol_type = other RNA
acaaatggaaaatgggatca

SEQ ID NO: 15036 - RNA, 20 nt, synthetic construct
  source 1..20: mol_type = other RNA
acaaattaaggcttgagctg

SEQ ID NO: 15037 - RNA, 20 nt, synthetic construct
  source 1..20: mol_type = other RNA
acaacaaatggaaaatggga

SEQ ID NO: 15038 - RNA, 20 nt, synthetic construct
  source 1..20: mol_type = other RNA
acaacaaccccagaattact

SEQ ID NO: 15039 - RNA, 20 nt, synthetic construct
  source 1..20: mol_type = other RNA
acaacagaccatggaaggca

SEQ ID NO: 15040 - RNA, 20 nt, synthetic construct
  source 1..20: mol_type = other RNA
acaacagtgaaagcaagcgt

SEQ ID NO: 15041 - RNA, 20 nt, synthetic construct
  source 1..20: mol_type = other RNA
acaaccccagaattactatg

SEQ ID NO: 15042 - RNA, 20 nt, synthetic construct
  source 1..20: mol_type = other RNA
acaacttgctgtaaacagta

SEQ ID NO: 15043 - RNA, 20 nt, synthetic construct
  source 1..20: mol_type = other RNA
acaagacactattccttcaa

SEQ ID NO: 15044 - RNA, 20 nt, synthetic construct
  source 1..20: mol_type = other RNA
acaagatgtaagatggatca

SEQ ID NO: 15045 - RNA, 20 nt, synthetic construct
  source 1..20: mol_type = other RNA
acaagcagttaaatgaaatg

SEQ ID NO: 15046 - RNA, 20 nt, synthetic construct
  source 1..20: mol_type = other RNA
acaagccagtaatggagttt

SEQ ID NO: 15047 - RNA, 20 nt, synthetic construct
  source 1..20: mol_type = other RNA
acaagtccggggctacagct

SEQ ID NO: 15048 - RNA, 20 nt, synthetic construct
  source 1..20: mol_type = other RNA
acaagttttcacttcctgga

SEQ ID NO: 15049 - RNA, 20 nt, synthetic construct
  source 1..20: mol_type = other RNA
acaatcacaaagtaagtttt

SEQ ID NO: 15050 - RNA, 20 nt, synthetic construct
  source 1..20: mol_type = other RNA
acaatcatcctaacaagatg

SEQ ID NO: 15051 - RNA, 20 nt, synthetic construct
  source 1..20: mol_type = other RNA
acacaaatatgacctctctc

SEQ ID NO: 15052 - RNA, 20 nt, synthetic construct
  source 1..20: mol_type = other RNA
acacaaattcgtaaactttc

SEQ ID NO: 15053 - RNA, 20 nt, synthetic construct
  source 1..20: mol_type = other RNA
acacacaaatatgacctctc

SEQ ID NO: 15054 - RNA, 20 nt, synthetic construct
  source 1..20: mol_type = other RNA
acacacacaaatatgacctc

SEQ ID NO: 15055 - RNA, 20 nt, synthetic construct
  source 1..20: mol_type = other RNA
acacagacctattcttcatt

SEQ ID NO: 15056 - RNA, 20 nt, synthetic construct
  source 1..20: mol_type = other RNA
acacaggcatctgagatcag

SEQ ID NO: 15057 - RNA, 20 nt, synthetic construct
  source 1..20: mol_type = other RNA
acaccaaatgctttttatat

SEQ ID NO: 15058 - RNA, 20 nt, synthetic construct
  source 1..20: mol_type = other RNA
acaccaggctacccaagatc

SEQ ID NO: 15059 - RNA, 20 nt, synthetic construct
  source 1..20: mol_type = other RNA
acacccctggtttacaggat

SEQ ID NO: 15060 - RNA, 20 nt, synthetic construct
  source 1..20: mol_type = other RNA
acactaaagacagagacagc

SEQ ID NO: 15061 - RNA, 20 nt, synthetic construct
  source 1..20: mol_type = other RNA
acactattccttcaaaaagc

SEQ ID NO: 15062 - RNA, 20 nt, synthetic construct
  source 1..20: mol_type = other RNA
acactgcaagaactgtcttg

SEQ ID NO: 15063 - RNA, 20 nt, synthetic construct
  source 1..20: mol_type = other RNA
acacttgattggaggagctc

SEQ ID NO: 15064 - RNA, 20 nt, synthetic construct
  source 1..20: mol_type = other RNA
acactttggtggtgcagcaa

SEQ ID NO: 15065 - RNA, 20 nt, synthetic construct
  source 1..20: mol_type = other RNA
acagaaatgagaggtattta

SEQ ID NO: 15066 - RNA, 20 nt, synthetic construct
  source 1..20: mol_type = other RNA
acagaaatttaggctgggtt

SEQ ID NO: 15067 - RNA, 20 nt, synthetic construct
  source 1..20: mol_type = other RNA
acagaacaagtccggggcta

SEQ ID NO: 15068 - RNA, 20 nt, synthetic construct
  source 1..20: mol_type = other RNA
acagaatacgtggacattga

SEQ ID NO: 15069 - RNA, 20 nt, synthetic construct
  source 1..20: mol_type = other RNA
acagaatcccagctaaggaa

SEQ ID NO: 15070 - RNA, 20 nt, synthetic construct
  source 1..20: mol_type = other RNA
acagaattcatcctgtaaac

SEQ ID NO: 15071 - RNA, 20 nt, synthetic construct
  source 1..20: mol_type = other RNA
acagacataaagcatgatca

SEQ ID NO: 15072 - RNA, 20 nt, synthetic construct
  source 1..20: mol_type = other RNA
acagaccatggaaggcatga

SEQ ID NO: 15073 - RNA, 20 nt, synthetic construct
  source 1..20: mol_type = other RNA
acagacctattcttcattca

SEQ ID NO: 15074 - RNA, 20 nt, synthetic construct
  source 1..20: mol_type = other RNA
acagagaattggatctgagg

SEQ ID NO: 15075 - RNA, 20 nt, synthetic construct
  source 1..20: mol_type = other RNA
acagagacagcaatttggaa

SEQ ID NO: 15076 - RNA, 20 nt, synthetic construct
  source 1..20: mol_type = other RNA
acagattggttccaccacaa

SEQ ID NO: 15077 - RNA, 20 nt, synthetic construct
  source 1..20: mol_type = other RNA
acagcaagttgtctaacccg

SEQ ID NO: 15078 - RNA, 20 nt, synthetic construct
  source 1..20: mol_type = other RNA
acagcaatttggaagctatc

SEQ ID NO: 15079 - RNA, 20 nt, synthetic construct
  source 1..20: mol_type = other RNA
acagctatactgtccacagt

SEQ ID NO: 15080 - RNA, 20 nt, synthetic construct
  source 1..20: mol_type = other RNA
acagctttttcatttttcac

SEQ ID NO: 15081 - RNA, 20 nt, synthetic construct
  source 1..20: mol_type = other RNA
acaggagctacatagttaaa

SEQ ID NO: 15082 - RNA, 20 nt, synthetic construct
  source 1..20: mol_type = other RNA
acaggatgaattctgttctc

SEQ ID NO: 15083 - RNA, 20 nt, synthetic construct
  source 1..20: mol_type = other RNA
acaggcatctgagatcagtt

SEQ ID NO: 15084 - RNA, 20 nt, synthetic construct
  source 1..20: mol_type = other RNA
acaggtgaaactccattact

SEQ ID NO: 15085 - RNA, 20 nt, synthetic construct
  source 1..20: mol_type = other RNA
acagtacaagccagtaatgg

SEQ ID NO: 15086 - RNA, 20 nt, synthetic construct
  source 1..20: mol_type = other RNA
acagtatagctgtagccccg

SEQ ID NO: 15087 - RNA, 20 nt, synthetic construct
  source 1..20: mol_type = other RNA
acagtccaggtgatcttgac

SEQ ID NO: 15088 - RNA, 20 nt, synthetic construct
  source 1..20: mol_type = other RNA
acagtgaaagcaagcgttaa

SEQ ID NO: 15089 - RNA, 20 nt, synthetic construct
  source 1..20: mol_type = other RNA
acagttcttgcagtgtggcc

SEQ ID NO: 15090 - RNA, 20 nt, synthetic construct
  source 1..20: mol_type = other RNA
acagtttaatggaatctcac

SEQ ID NO: 15091 - RNA, 20 nt, synthetic construct
  source 1..20: mol_type = other RNA
acataaagcatgatcacctg

SEQ ID NO: 15092 - RNA, 20 nt, synthetic construct
  source 1..20: mol_type = other RNA
acatactacacacacaaata

SEQ ID NO: 15093 - RNA, 20 nt, synthetic construct
  source 1..20: mol_type = other RNA
acatagcactagctttctcc

SEQ ID NO: 15094 - RNA, 20 nt, synthetic construct
  source 1..20: mol_type = other RNA
acatataaaggacagctgat

SEQ ID NO: 15095 - RNA, 20 nt, synthetic construct
  source 1..20: mol_type = other RNA
acatcagagtatactaggag

SEQ ID NO: 15096 - RNA, 20 nt, synthetic construct
  source 1..20: mol_type = other RNA
acatctccctttttcttcct

SEQ ID NO: 15097 - RNA, 20 nt, synthetic construct
  source 1..20: mol_type = other RNA
acatcttgttaggatgattg

SEQ ID NO: 15098 - RNA, 20 nt, synthetic construct
  source 1..20: mol_type = other RNA
acatctttaaaaatggtttg

SEQ ID NO: 15099 - RNA, 20 nt, synthetic construct
  source 1..20: mol_type = other RNA
acatggaatgaattgcagtt

SEQ ID NO: 15100 - RNA, 20 nt, synthetic construct
  source 1..20: mol_type = other RNA
acatgtaaatgtctttatgg

SEQ ID NO: 15101 - RNA, 20 nt, synthetic construct
  source 1..20: mol_type = other RNA
acatgtcgctcactccattt

SEQ ID NO: 15102 - RNA, 20 nt, synthetic construct
  source 1..20: mol_type = other RNA
acattcacgagaacagaatt

SEQ ID NO: 15103 - RNA, 20 nt, synthetic construct
  source 1..20: mol_type = other RNA
acattgatggttttctcttt

SEQ ID NO: 15104 - RNA, 20 nt, synthetic construct
  source 1..20: mol_type = other RNA
acatttaagaacgtgaacta

SEQ ID NO: 15105 - RNA, 20 nt, synthetic construct
  source 1..20: mol_type = other RNA
acatttacatgtcgctcact

SEQ ID NO: 15106 - RNA, 20 nt, synthetic construct
  source 1..20: mol_type = other RNA
acatttcatttaactgcttg

SEQ ID NO: 15107 - RNA, 20 nt, synthetic construct
  source 1..20: mol_type = other RNA
acatttgaatctgcaggatt

SEQ ID NO: 15108 - RNA, 20 nt, synthetic construct
  source 1..20: mol_type = other RNA
acattttattaatcttgagc

SEQ ID NO: 15109 - RNA, 20 nt, synthetic construct
  source 1..20: mol_type = other RNA
accaaaggggagatgacatt

SEQ ID NO: 15110 - RNA, 20 nt, synthetic construct
  source 1..20: mol_type = other RNA
accaaagtgtagcatcaggt

SEQ ID NO: 15111 - RNA, 20 nt, synthetic construct
  source 1..20: mol_type = other RNA
accaaatgctttttatattg

SEQ ID NO: 15112 - RNA, 20 nt, synthetic construct
  source 1..20: mol_type = other RNA
accaacattttaacaccaaa

SEQ ID NO: 15113 - RNA, 20 nt, synthetic construct
  source 1..20: mol_type = other RNA
accaatctgtctggtttcgc

SEQ ID NO: 15114 - RNA, 20 nt, synthetic construct
  source 1..20: mol_type = other RNA
accacaaattaaggcttgag

SEQ ID NO: 15115 - RNA, 20 nt, synthetic construct
  source 1..20: mol_type = other RNA
accaccaaagtgtagcatca

SEQ ID NO: 15116 - RNA, 20 nt, synthetic construct
  source 1..20: mol_type = other RNA
accaccccacaaagatatat

SEQ ID NO: 15117 - RNA, 20 nt, synthetic construct
  source 1..20: mol_type = other RNA
accagacagattggttccac

SEQ ID NO: 15118 - RNA, 20 nt, synthetic construct
  source 1..20: mol_type = other RNA
accagccacttttccaatgc

SEQ ID NO: 15119 - RNA, 20 nt, synthetic construct
  source 1..20: mol_type = other RNA
accaggcatcttagcaactc

SEQ ID NO: 15120 - RNA, 20 nt, synthetic construct
  source 1..20: mol_type = other RNA
accaggctacccaagatcaa

SEQ ID NO: 15121 - RNA, 20 nt, synthetic construct
  source 1..20: mol_type = other RNA
accagtgcttccctccctca

SEQ ID NO: 15122 - RNA, 20 nt, synthetic construct
  source 1..20: mol_type = other RNA
accagttagtaactgatctc

SEQ ID NO: 15123 - RNA, 20 nt, synthetic construct
  source 1..20: mol_type = other RNA
accataaagacatttacatg

SEQ ID NO: 15124 - RNA, 20 nt, synthetic construct
  source 1..20: mol_type = other RNA
accatcaatgtccacgtatt

SEQ ID NO: 15125 - RNA, 20 nt, synthetic construct
  source 1..20: mol_type = other RNA
accatggaaggcatgaccaa

SEQ ID NO: 15126 - RNA, 20 nt, synthetic construct
  source 1..20: mol_type = other RNA
accatttgagacccttgctg

SEQ ID NO: 15127 - RNA, 20 nt, synthetic construct
  source 1..20: mol_type = other RNA
accatttttaaagatgtgcc

SEQ ID NO: 15128 - RNA, 20 nt, synthetic construct
  source 1..20: mol_type = other RNA
acccaaactgcccttttaaa

SEQ ID NO: 15129 - RNA, 20 nt, synthetic construct
  source 1..20: mol_type = other RNA
acccaaatcatagagacgtc

SEQ ID NO: 15130 - RNA, 20 nt, synthetic construct
  source 1..20: mol_type = other RNA
acccaagatcaagagaggga

SEQ ID NO: 15131 - RNA, 20 nt, synthetic construct
  source 1..20: mol_type = other RNA
acccacgcagtacaaactgc

SEQ ID NO: 15132 - RNA, 20 nt, synthetic construct
  source 1..20: mol_type = other RNA
acccagcagtgcttttattc

SEQ ID NO: 15133 - RNA, 20 nt, synthetic construct
  source 1..20: mol_type = other RNA
acccagcctaaatttctgtc

SEQ ID NO: 15134 - RNA, 20 nt, synthetic construct
  source 1..20: mol_type = other RNA
acccaggacagctttgaatg

SEQ ID NO: 15135 - RNA, 20 nt, synthetic construct
  source 1..20: mol_type = other RNA
accccacaaagatatatgac

SEQ ID NO: 15136 - RNA, 20 nt, synthetic construct
  source 1..20: mol_type = other RNA
accccagaattactatgacc

SEQ ID NO: 15137 - RNA, 20 nt, synthetic construct
  source 1..20: mol_type = other RNA
acccctggtttacaggatga

SEQ ID NO: 15138 - RNA, 20 nt, synthetic construct
  source 1..20: mol_type = other RNA
acccctttgcatccctacca

SEQ ID NO: 15139 - RNA, 20 nt, synthetic construct
  source 1..20: mol_type = other RNA
acccgcgggccgcatgggac

SEQ ID NO: 15140 - RNA, 20 nt, synthetic construct
  source 1..20: mol_type = other RNA
accctctctccccaggctct

SEQ ID NO: 15141 - RNA, 20 nt, synthetic construct
  source 1..20: mol_type = other RNA
acccttgctgcaccaccaaa

SEQ ID NO: 15142 - RNA, 20 nt, synthetic construct
  source 1..20: mol_type = other RNA
acccttgctgcttttaatcc

SEQ ID NO: 15143 - RNA, 20 nt, synthetic construct
  source 1..20: mol_type = other RNA
accgtcttcacagtccaggt

SEQ ID NO: 15144 - RNA, 20 nt, synthetic construct
  source 1..20: mol_type = other RNA
acctattcttcattcaagtt

SEQ ID NO: 15145 - RNA, 20 nt, synthetic construct
  source 1..20: mol_type = other RNA
acctcagatccaattctctg

SEQ ID NO: 15146 - RNA, 20 nt, synthetic construct
  source 1..20: mol_type = other RNA
acctccctaaaattcattat

SEQ ID NO: 15147 - RNA, 20 nt, synthetic construct
  source 1..20: mol_type = other RNA
acctctcatttctgttctta

SEQ ID NO: 15148 - RNA, 20 nt, synthetic construct
  source 1..20: mol_type = other RNA
acctctctcctgaagtcaca

SEQ ID NO: 15149 - RNA, 20 nt, synthetic construct
  source 1..20: mol_type = other RNA
acctgagttttataccattt

SEQ ID NO: 15150 - RNA, 20 nt, synthetic construct
  source 1..20: mol_type = other RNA
acctgatgctacactttggt

SEQ ID NO: 15151 - RNA, 20 nt, synthetic construct
  source 1..20: mol_type = other RNA
acctggactgtgaagacggt

SEQ ID NO: 15152 - RNA, 20 nt, synthetic construct
  source 1..20: mol_type = other RNA
acctgtcattttcatgctct

SEQ ID NO: 15153 - RNA, 20 nt, synthetic construct
  source 1..20: mol_type = other RNA
accttaactattctgagctt

SEQ ID NO: 15154 - RNA, 20 nt, synthetic construct
  source 1..20: mol_type = other RNA
accttatgcatcacattcac

SEQ ID NO: 15155 - RNA, 20 nt, synthetic construct
  source 1..20: mol_type = other RNA
acgagaacagaattcatcct

SEQ ID NO: 15156 - RNA, 20 nt, synthetic construct
  source 1..20: mol_type = other RNA
acgagactgcggattatcac

SEQ ID NO: 15157 - RNA, 20 nt, synthetic construct
  source 1..20: mol_type = other RNA
acgcagtacaaactgctcag

SEQ ID NO: 15158 - RNA, 20 nt, synthetic construct
  source 1..20: mol_type = other RNA
acgcttgctttcactgttgt

SEQ ID NO: 15159 - RNA, 20 nt, synthetic construct
  source 1..20: mol_type = other RNA
acggtcagggacagaatccc

SEQ ID NO: 15160 - RNA, 20 nt, synthetic construct
  source 1..20: mol_type = other RNA
acgtattctgtaatccacag

SEQ ID NO: 15161 - RNA, 20 nt, synthetic construct
  source 1..20: mol_type = other RNA
acgtcatatatctttgtggg

SEQ ID NO: 15162 - RNA, 20 nt, synthetic construct
  source 1..20: mol_type = other RNA
acgtctctatgatttgggta

SEQ ID NO: 15163 - RNA, 20 nt, synthetic construct
  source 1..20: mol_type = other RNA
acgtgaactagggaggaata

SEQ ID NO: 15164 - RNA, 20 nt, synthetic construct
  source 1..20: mol_type = other RNA
acgtggacattgatggtttt

SEQ ID NO: 15165 - RNA, 20 nt, synthetic construct
  source 1..20: mol_type = other RNA
acgttcttaaatgtttatct

SEQ ID NO: 15166 - RNA, 20 nt, synthetic construct
  source 1..20: mol_type = other RNA
actaaagacagagacagcaa

SEQ ID NO: 15167 - RNA, 20 nt, synthetic construct
  source 1..20: mol_type = other RNA
actaactggtaagaacagaa

SEQ ID NO: 15168 - RNA, 20 nt, synthetic construct
  source 1..20: mol_type = other RNA
actacacacacaaatatgac

SEQ ID NO: 15169 - RNA, 20 nt, synthetic construct
  source 1..20: mol_type = other RNA
actactgctttacagagaat

SEQ ID NO: 15170 - RNA, 20 nt, synthetic construct
  source 1..20: mol_type = other RNA
actacttatcatttttggag

SEQ ID NO: 15171 - RNA, 20 nt, synthetic construct
  source 1..20: mol_type = other RNA
actagaggagcaagtacaac

SEQ ID NO: 15172 - RNA, 20 nt, synthetic construct
  source 1..20: mol_type = other RNA
actagctttctccctctctt

SEQ ID NO: 15173 - RNA, 20 nt, synthetic construct
  source 1..20: mol_type = other RNA
actaggagctcaggagtaca

SEQ ID NO: 15174 - RNA, 20 nt, synthetic construct
  source 1..20: mol_type = other RNA
actagggaggaataaaagca

SEQ ID NO: 15175 - RNA, 20 nt, synthetic construct
  source 1..20: mol_type = other RNA
actatgacccacgcagtaca

SEQ ID NO: 15176 - RNA, 20 nt, synthetic construct
  source 1..20: mol_type = other RNA
actatgtagctcctgtaaca

SEQ ID NO: 15177 - RNA, 20 nt, synthetic construct
  source 1..20: mol_type = other RNA
actattccttcaaaaagctc

SEQ ID NO: 15178 - RNA, 20 nt, synthetic construct
  source 1..20: mol_type = other RNA
actattctgagctttttgaa

SEQ ID NO: 15179 - RNA, 20 nt, synthetic construct
  source 1..20: mol_type = other RNA
actattttccacatactaca

SEQ ID NO: 15180 - RNA, 20 nt, synthetic construct
  source 1..20: mol_type = other RNA
actcaagatatgatgcttag

SEQ ID NO: 15181 - RNA, 20 nt, synthetic construct
  source 1..20: mol_type = other RNA
actcaggtgatcatgcttta

SEQ ID NO: 15182 - RNA, 20 nt, synthetic construct
  source 1..20: mol_type = other RNA
actcatacttgatcccattt

SEQ ID NO: 15183 - RNA, 20 nt, synthetic construct
  source 1..20: mol_type = other RNA
actcattaacgcttgctttc

SEQ ID NO: 15184 - RNA, 20 nt, synthetic construct
  source 1..20: mol_type = other RNA
actccattactggcttgtac

SEQ ID NO: 15185 - RNA, 20 nt, synthetic construct
  source 1..20: mol_type = other RNA
actccatttacttaaagttg

SEQ ID NO: 15186 - RNA, 20 nt, synthetic construct
  source 1..20: mol_type = other RNA
actcctaaaactttaagaaa

SEQ ID NO: 15187 - RNA, 20 nt, synthetic construct
  source 1..20: mol_type = other RNA
actcctgagcagtttgtact

SEQ ID NO: 15188 - RNA, 20 nt, synthetic construct
  source 1..20: mol_type = other RNA
actcctgagctcctagtata

SEQ ID NO: 15189 - RNA, 20 nt, synthetic construct
  source 1..20: mol_type = other RNA
actctcactcatacttgatc

SEQ ID NO: 15190 - RNA, 20 nt, synthetic construct
  source 1..20: mol_type = other RNA
actctgatgtctagccaact

SEQ ID NO: 15191 - RNA, 20 nt, synthetic construct
  source 1..20: mol_type = other RNA
actcttacccagcagtgctt

SEQ ID NO: 15192 - RNA, 20 nt, synthetic construct
  source 1..20: mol_type = other RNA
actgagcagtaaggaaataa

SEQ ID NO: 15193 - RNA, 20 nt, synthetic construct
  source 1..20: mol_type = other RNA
actgatctcagatgcctgtg

SEQ ID NO: 15194 - RNA, 20 nt, synthetic construct
  source 1..20: mol_type = other RNA
actgcaagaactgtcttggg

SEQ ID NO: 15195 - RNA, 20 nt, synthetic construct
  source 1..20: mol_type = other RNA
actgcaattcattccatgtg

SEQ ID NO: 15196 - RNA, 20 nt, synthetic construct
  source 1..20: mol_type = other RNA
actgcccttttaaaaaagca

SEQ ID NO: 15197 - RNA, 20 nt, synthetic construct
  source 1..20: mol_type = other RNA
actgcggattatcactactt

SEQ ID NO: 15198 - RNA, 20 nt, synthetic construct
  source 1..20: mol_type = other RNA
actgcgtgggtcatagtaat

SEQ ID NO: 15199 - RNA, 20 nt, synthetic construct
  source 1..20: mol_type = other RNA
actgctcaggagtcagaaga

SEQ ID NO: 15200 - RNA, 20 nt, synthetic construct
  source 1..20: mol_type = other RNA
actgctcagtaaaaagagaa

SEQ ID NO: 15201 - RNA, 20 nt, synthetic construct
  source 1..20: mol_type = other RNA
actgctgggtaagagtcaag

SEQ ID NO: 15202 - RNA, 20 nt, synthetic construct
  source 1..20: mol_type = other RNA
actgctttacagagaattgg

SEQ ID NO: 15203 - RNA, 20 nt, synthetic construct
  source 1..20: mol_type = other RNA
actgcttttttaaaagggca

SEQ ID NO: 15204 - RNA, 20 nt, synthetic construct
  source 1..20: mol_type = other RNA
actggcttgtactgtttaca

SEQ ID NO: 15205 - RNA, 20 nt, synthetic construct
  source 1..20: mol_type = other RNA
actggtaagaacagaaatga

SEQ ID NO: 15206 - RNA, 20 nt, synthetic construct
  source 1..20: mol_type = other RNA
actggtttctcaagcaaaag

SEQ ID NO: 15207 - RNA, 20 nt, synthetic construct
  source 1..20: mol_type = other RNA
actgtattagcaatataaaa

SEQ ID NO: 15208 - RNA, 20 nt, synthetic construct
  source 1..20: mol_type = other RNA
actgtccacagttgcaattc

SEQ ID NO: 15209 - RNA, 20 nt, synthetic construct
  source 1..20: mol_type = other RNA
actgtcttgggccacatata

SEQ ID NO: 15210 - RNA, 20 nt, synthetic construct
  source 1..20: mol_type = other RNA
actgtgaagacggtcaggga

SEQ ID NO: 15211 - RNA, 20 nt, synthetic construct
  source 1..20: mol_type = other RNA
actgtggacagtatagctgt

SEQ ID NO: 15212 - RNA, 20 nt, synthetic construct
  source 1..20: mol_type = other RNA
actgttacaggagctacata

SEQ ID NO: 15213 - RNA, 20 nt, synthetic construct
  source 1..20: mol_type = other RNA
actgttgtccaaggcaggca

SEQ ID NO: 15214 - RNA, 20 nt, synthetic construct
  source 1..20: mol_type = other RNA
actgtttacagcaagttgtc

SEQ ID NO: 15215 - RNA, 20 nt, synthetic construct
  source 1..20: mol_type = other RNA
acttaaagttggctagacat

SEQ ID NO: 15216 - RNA, 20 nt, synthetic construct
  source 1..20: mol_type = other RNA
acttactttgtgattgtttt

SEQ ID NO: 15217 - RNA, 20 nt, synthetic construct
  source 1..20: mol_type = other RNA
acttatcatttttggagcat

SEQ ID NO: 15218 - RNA, 20 nt, synthetic construct
  source 1..20: mol_type = other RNA
acttcaggagagaggtcata

SEQ ID NO: 15219 - RNA, 20 nt, synthetic construct
  source 1..20: mol_type = other RNA
acttcctggaaacacttgat

SEQ ID NO: 15220 - RNA, 20 nt, synthetic construct
  source 1..20: mol_type = other RNA
acttgaatgaagaataggtc

SEQ ID NO: 15221 - RNA, 20 nt, synthetic construct
  source 1..20: mol_type = other RNA
acttgatcccattttccatt

SEQ ID NO: 15222 - RNA, 20 nt, synthetic construct
  source 1..20: mol_type = other RNA
acttgattggaggagctcta

SEQ ID NO: 15223 - RNA, 20 nt, synthetic construct
  source 1..20: mol_type = other RNA
acttgctcctctagtattca

SEQ ID NO: 15224 - RNA, 20 nt, synthetic construct
  source 1..20: mol_type = other RNA
acttgctgtaaacagtacaa

SEQ ID NO: 15225 - RNA, 20 nt, synthetic construct
  source 1..20: mol_type = other RNA
acttgtaggacagaaattta

SEQ ID NO: 15226 - RNA, 20 nt, synthetic construct
  source 1..20: mol_type = other RNA
acttgttctgtggattacag

SEQ ID NO: 15227 - RNA, 20 nt, synthetic construct
  source 1..20: mol_type = other RNA
actttaagtaaatggagtga

SEQ ID NO: 15228 - RNA, 20 nt, synthetic construct
  source 1..20: mol_type = other RNA
actttcctcaatttaacagc

SEQ ID NO: 15229 - RNA, 20 nt, synthetic construct
  source 1..20: mol_type = other RNA
actttggtggtgcagcaagg

SEQ ID NO: 15230 - RNA, 20 nt, synthetic construct
  source 1..20: mol_type = other RNA
actttgtgattgttttctat

SEQ ID NO: 15231 - RNA, 20 nt, synthetic construct
  source 1..20: mol_type = other RNA
acttttccaatgctcaagat

SEQ ID NO: 15232 - RNA, 20 nt, synthetic construct
  source 1..20: mol_type = other RNA
agaaaaagggagatgttgcc

SEQ ID NO: 15233 - RNA, 20 nt, synthetic construct
  source 1..20: mol_type = other RNA
agaaaaatgctccaaaaatg

SEQ ID NO: 15234 - RNA, 20 nt, synthetic construct
  source 1..20: mol_type = other RNA
agaaaaattttagcttttgc

SEQ ID NO: 15235 - RNA, 20 nt, synthetic construct
  source 1..20: mol_type = other RNA
agaaaacaatcacaaagtaa

SEQ ID NO: 15236 - RNA, 20 nt, synthetic construct
  source 1..20: mol_type = other RNA
agaaaaccatcaatgtccac

SEQ ID NO: 15237 - RNA, 20 nt, synthetic construct
  source 1..20: mol_type = other RNA
agaaaactgcttttttaaaa

SEQ ID NO: 15238 - RNA, 20 nt, synthetic construct
  source 1..20: mol_type = other RNA
agaaaccagtgcttccctcc

SEQ ID NO: 15239 - RNA, 20 nt, synthetic construct
  source 1..20: mol_type = other RNA
agaaagctagtgctatgtct

SEQ ID NO: 15240 - RNA, 20 nt, synthetic construct
  source 1..20: mol_type = other RNA
agaaatgagaggtatttaga

SEQ ID NO: 15241 - RNA, 20 nt, synthetic construct
  source 1..20: mol_type = other RNA
agaaatttaggctgggttca

SEQ ID NO: 15242 - RNA, 20 nt, synthetic construct
  source 1..20: mol_type = other RNA
agaacaacagaccatggaag

SEQ ID NO: 15243 - RNA, 20 nt, synthetic construct
  source 1..20: mol_type = other RNA
agaacaagtccggggctaca

SEQ ID NO: 15244 - RNA, 20 nt, synthetic construct
  source 1..20: mol_type = other RNA
agaacagaaatgagaggtat

SEQ ID NO: 15245 - RNA, 20 nt, synthetic construct
  source 1..20: mol_type = other RNA
agaacagaattcatcctgta

SEQ ID NO: 15246 - RNA, 20 nt, synthetic construct
  source 1..20: mol_type = other RNA
agaaccaccccacaaagata

SEQ ID NO: 15247 - RNA, 20 nt, synthetic construct
  source 1..20: mol_type = other RNA
agaacgtgaactagggagga

SEQ ID NO: 15248 - RNA, 20 nt, synthetic construct
  source 1..20: mol_type = other RNA
agaactgtcttgggccacat

SEQ ID NO: 15249 - RNA, 20 nt, synthetic construct
  source 1..20: mol_type = other RNA
agaacttgaatgaagaatag

SEQ ID NO: 15250 - RNA, 20 nt, synthetic construct
  source 1..20: mol_type = other RNA
agaagaaaactgctttttta

SEQ ID NO: 15251 - RNA, 20 nt, synthetic construct
  source 1..20: mol_type = other RNA
agaatacgtggacattgatg

SEQ ID NO: 15252 - RNA, 20 nt, synthetic construct
  source 1..20: mol_type = other RNA
agaataggtctgtgtgatac

SEQ ID NO: 15253 - RNA, 20 nt, synthetic construct
  source 1..20: mol_type = other RNA
agaatagttaaggtaattta

SEQ ID NO: 15254 - RNA, 20 nt, synthetic construct
  source 1..20: mol_type = other RNA
agaatcccagctaaggaaaa

SEQ ID NO: 15255 - RNA, 20 nt, synthetic construct
  source 1..20: mol_type = other RNA
agaattactatgacccacgc

SEQ ID NO: 15256 - RNA, 20 nt, synthetic construct
  source 1..20: mol_type = other RNA
agaattcatcctgtaaacca

SEQ ID NO: 15257 - RNA, 20 nt, synthetic construct
  source 1..20: mol_type = other RNA
agaattggatctgaggttag

SEQ ID NO: 15258 - RNA, 20 nt, synthetic construct
  source 1..20: mol_type = other RNA
agacaacttgctgtaaacag

SEQ ID NO: 15259 - RNA, 20 nt, synthetic construct
  source 1..20: mol_type = other RNA
agacaccaggctacccaaga

SEQ ID NO: 15260 - RNA, 20 nt, synthetic construct
  source 1..20: mol_type = other RNA
agacactattccttcaaaaa

SEQ ID NO: 15261 - RNA, 20 nt, synthetic construct
  source 1..20: mol_type = other RNA
agacagacataaagcatgat

SEQ ID NO: 15262 - RNA, 20 nt, synthetic construct
  source 1..20: mol_type = other RNA
agacagagacagcaatttgg

SEQ ID NO: 15263 - RNA, 20 nt, synthetic construct
  source 1..20: mol_type = other RNA
agacagattggttccaccac

SEQ ID NO: 15264 - RNA, 20 nt, synthetic construct
  source 1..20: mol_type = other RNA
agacagcaatttggaagcta

SEQ ID NO: 15265 - RNA, 20 nt, synthetic construct
  source 1..20: mol_type = other RNA
agacagttcttgcagtgtgg

SEQ ID NO: 15266 - RNA, 20 nt, synthetic construct
  source 1..20: mol_type = other RNA
agacataaagcatgatcacc

SEQ ID NO: 15267 - RNA, 20 nt, synthetic construct
  source 1..20: mol_type = other RNA
agacatagcactagctttct

SEQ ID NO: 15268 - RNA, 20 nt, synthetic construct
  source 1..20: mol_type = other RNA
agacatcagagtatactagg

SEQ ID NO: 15269 - RNA, 20 nt, synthetic construct
  source 1..20: mol_type = other RNA
agacatttacatgtcgctca

SEQ ID NO: 15270 - RNA, 20 nt, synthetic construct
  source 1..20: mol_type = other RNA
agaccatggaaggcatgacc

SEQ ID NO: 15271 - RNA, 20 nt, synthetic construct
  source 1..20: mol_type = other RNA
agacccttgctgcaccacca

SEQ ID NO: 15272 - RNA, 20 nt, synthetic construct
  source 1..20: mol_type = other RNA
agacctattcttcattcaag

SEQ ID NO: 15273 - RNA, 20 nt, synthetic construct
  source 1..20: mol_type = other RNA
agacggtcagggacagaatc

SEQ ID NO: 15274 - RNA, 20 nt, synthetic construct
  source 1..20: mol_type = other RNA
agacgtcatatatctttgtg

SEQ ID NO: 15275 - RNA, 20 nt, synthetic construct
  source 1..20: mol_type = other RNA
agactgcggattatcactac

SEQ ID NO: 15276 - RNA, 20 nt, synthetic construct
  source 1..20: mol_type = other RNA
agactttcctcaatttaaca

SEQ ID NO: 15277 - RNA, 20 nt, synthetic construct
  source 1..20: mol_type = other RNA
agagaaaaccatcaatgtcc

SEQ ID NO: 15278 - RNA, 20 nt, synthetic construct
  source 1..20: mol_type = other RNA
agagaattggatctgaggtt

SEQ ID NO: 15279 - RNA, 20 nt, synthetic construct
  source 1..20: mol_type = other RNA
agagacagacataaagcatg

SEQ ID NO: 15280 - RNA, 20 nt, synthetic construct
  source 1..20: mol_type = other RNA
agagacagcaatttggaagc

SEQ ID NO: 15281 - RNA, 20 nt, synthetic construct
  source 1..20: mol_type = other RNA
agagacgtcatatatctttg

SEQ ID NO: 15282 - RNA, 20 nt, synthetic construct
  source 1..20: mol_type = other RNA
agagagcctggggagagagg

SEQ ID NO: 15283 - RNA, 20 nt, synthetic construct
  source 1..20: mol_type = other RNA
agagagcttcagcttttatt

SEQ ID NO: 15284 - RNA, 20 nt, synthetic construct
  source 1..20: mol_type = other RNA
agagagggagaaagctagtg

SEQ ID NO: 15285 - RNA, 20 nt, synthetic construct
  source 1..20: mol_type = other RNA
agagagggtgagggagggaa

SEQ ID NO: 15286 - RNA, 20 nt, synthetic construct
  source 1..20: mol_type = other RNA
agagaggtcatatttgtgtg

SEQ ID NO: 15287 - RNA, 20 nt, synthetic construct
  source 1..20: mol_type = other RNA
agagcatgaaaatgacaggt

SEQ ID NO: 15288 - RNA, 20 nt, synthetic construct
  source 1..20: mol_type = other RNA
agagcctggggagagagggt

SEQ ID NO: 15289 - RNA, 20 nt, synthetic construct
  source 1..20: mol_type = other RNA
agagctcctccaatcaagtg

SEQ ID NO: 15290 - RNA, 20 nt, synthetic construct
  source 1..20: mol_type = other RNA
agagcttcagcttttatttc

SEQ ID NO: 15291 - RNA, 20 nt, synthetic construct
  source 1..20: mol_type = other RNA
agaggaagaaaaagggagat

SEQ ID NO: 15292 - RNA, 20 nt, synthetic construct
  source 1..20: mol_type = other RNA
agaggagcaagtacaacaaa

SEQ ID NO: 15293 - RNA, 20 nt, synthetic construct
  source 1..20: mol_type = other RNA
agagggagaaagctagtgct

SEQ ID NO: 15294 - RNA, 20 nt, synthetic construct
  source 1..20: mol_type = other RNA
agagggtgagggagggaagc

SEQ ID NO: 15295 - RNA, 20 nt, synthetic construct
  source 1..20: mol_type = other RNA
agaggtatttagaggaagaa

SEQ ID NO: 15296 - RNA, 20 nt, synthetic construct
  source 1..20: mol_type = other RNA
agaggtcatatttgtgtgtg

SEQ ID NO: 15297 - RNA, 20 nt, synthetic construct
  source 1..20: mol_type = other RNA
agagtatactaggagctcag

SEQ ID NO: 15298 - RNA, 20 nt, synthetic construct
  source 1..20: mol_type = other RNA
agagtcaagccccagctcaa

SEQ ID NO: 15299 - RNA, 20 nt, synthetic construct
  source 1..20: mol_type = other RNA
agagttgctaagatgcctgg

SEQ ID NO: 15300 - RNA, 20 nt, synthetic construct
  source 1..20: mol_type = other RNA
agataaacatttaagaacgt

SEQ ID NO: 15301 - RNA, 20 nt, synthetic construct
  source 1..20: mol_type = other RNA
agataacactaaagacagag

SEQ ID NO: 15302 - RNA, 20 nt, synthetic construct
  source 1..20: mol_type = other RNA
agatactgtattagcaatat

SEQ ID NO: 15303 - RNA, 20 nt, synthetic construct
  source 1..20: mol_type = other RNA
agatagagcatgaaaatgac

SEQ ID NO: 15304 - RNA, 20 nt, synthetic construct
  source 1..20: mol_type = other RNA
agatatatgacgtctctatg

SEQ ID NO: 15305 - RNA, 20 nt, synthetic construct
  source 1..20: mol_type = other RNA
agatatgatgcttagagctc

SEQ ID NO: 15306 - RNA, 20 nt, synthetic construct
  source 1..20: mol_type = other RNA
agatcaagagagggagaaag

SEQ ID NO: 15307 - RNA, 20 nt, synthetic construct
  source 1..20: mol_type = other RNA
agatcacctggactgtgaag

SEQ ID NO: 15308 - RNA, 20 nt, synthetic construct
  source 1..20: mol_type = other RNA
agatcagttactaactggta

SEQ ID NO: 15309 - RNA, 20 nt, synthetic construct
  source 1..20: mol_type = other RNA
agatccaattctctgtaaag

SEQ ID NO: 15310 - RNA, 20 nt, synthetic construct
  source 1..20: mol_type = other RNA
agatgacatttgaatctgca

SEQ ID NO: 15311 - RNA, 20 nt, synthetic construct
  source 1..20: mol_type = other RNA
agatgcctggtagggatgca

SEQ ID NO: 15312 - RNA, 20 nt, synthetic construct
  source 1..20: mol_type = other RNA
agatgcctgtgtgatagctt

SEQ ID NO: 15313 - RNA, 20 nt, synthetic construct
  source 1..20: mol_type = other RNA
agatggatcaaaagataaca

SEQ ID NO: 15314 - RNA, 20 nt, synthetic construct
  source 1..20: mol_type = other RNA
agatgtaagatggatcaaaa

SEQ ID NO: 15315 - RNA, 20 nt, synthetic construct
  source 1..20: mol_type = other RNA
agatgtgcctgccttggaca

SEQ ID NO: 15316 - RNA, 20 nt, synthetic construct
  source 1..20: mol_type = other RNA
agatgttgcctaacctcaga

SEQ ID NO: 15317 - RNA, 20 nt, synthetic construct
  source 1..20: mol_type = other RNA
agattcaaatgtcatctccc

SEQ ID NO: 15318 - RNA, 20 nt, synthetic construct
  source 1..20: mol_type = other RNA
agattccattaaactgttac

SEQ ID NO: 15319 - RNA, 20 nt, synthetic construct
  source 1..20: mol_type = other RNA
agattggacacccctggttt

SEQ ID NO: 15320 - RNA, 20 nt, synthetic construct
  source 1..20: mol_type = other RNA
agattggttccaccacaaat

SEQ ID NO: 15321 - RNA, 20 nt, synthetic construct
  source 1..20: mol_type = other RNA
agatttaacctgatgctaca

SEQ ID NO: 15322 - RNA, 20 nt, synthetic construct
  source 1..20: mol_type = other RNA
agcaactctcactcatactt

SEQ ID NO: 15323 - RNA, 20 nt, synthetic construct
  source 1..20: mol_type = other RNA
agcaagcgttaatgagtttg

SEQ ID NO: 15324 - RNA, 20 nt, synthetic construct
  source 1..20: mol_type = other RNA
agcaagggtagcattccaaa

SEQ ID NO: 15325 - RNA, 20 nt, synthetic construct
  source 1..20: mol_type = other RNA
agcaagggtctcaaatggta

SEQ ID NO: 15326 - RNA, 20 nt, synthetic construct
  source 1..20: mol_type = other RNA
agcaagtacaacaaatggaa

SEQ ID NO: 15327 - RNA, 20 nt, synthetic construct
  source 1..20: mol_type = other RNA
agcaagttgtctaacccgcg

SEQ ID NO: 15328 - RNA, 20 nt, synthetic construct
  source 1..20: mol_type = other RNA
agcaatataaaaagcatttg

SEQ ID NO: 15329 - RNA, 20 nt, synthetic construct
  source 1..20: mol_type = other RNA
agcaatgacaacaaccccag

SEQ ID NO: 15330 - RNA, 20 nt, synthetic construct
  source 1..20: mol_type = other RNA
agcaatttggaagctatcac

SEQ ID NO: 15331 - RNA, 20 nt, synthetic construct
  source 1..20: mol_type = other RNA
agcactagctttctccctct

SEQ ID NO: 15332 - RNA, 20 nt, synthetic construct
  source 1..20: mol_type = other RNA
agcactgctgggtaagagtc

SEQ ID NO: 15333 - RNA, 20 nt, synthetic construct
  source 1..20: mol_type = other RNA
agcactggtttctcaagcaa

SEQ ID NO: 15334 - RNA, 20 nt, synthetic construct
  source 1..20: mol_type = other RNA
agcagcaagggtagcattcc

SEQ ID NO: 15335 - RNA, 20 nt, synthetic construct
  source 1..20: mol_type = other RNA
agcagtaaggaaataaaagc

SEQ ID NO: 15336 - RNA, 20 nt, synthetic construct
  source 1..20: mol_type = other RNA
agcagtagtcaagatcacct

SEQ ID NO: 15337 - RNA, 20 nt, synthetic construct
  source 1..20: mol_type = other RNA
agcagtgcttttattcctcc

SEQ ID NO: 15338 - RNA, 20 nt, synthetic construct
  source 1..20: mol_type = other RNA
agcagttaaatgaaatgtaa

SEQ ID NO: 15339 - RNA, 20 nt, synthetic construct
  source 1..20: mol_type = other RNA
agcagtttgtactgcgtggg

SEQ ID NO: 15340 - RNA, 20 nt, synthetic construct
  source 1..20: mol_type = other RNA
agcagttttcttctgactcc

SEQ ID NO: 15341 - RNA, 20 nt, synthetic construct
  source 1..20: mol_type = other RNA
agcatcaggttaaatcttaa

SEQ ID NO: 15342 - RNA, 20 nt, synthetic construct
  source 1..20: mol_type = other RNA
agcatcatatcttgagttat

SEQ ID NO: 15343 - RNA, 20 nt, synthetic construct
  source 1..20: mol_type = other RNA
agcatgaaaatgacaggtga

SEQ ID NO: 15344 - RNA, 20 nt, synthetic construct
  source 1..20: mol_type = other RNA
agcatgatcacctgagtttt

SEQ ID NO: 15345 - RNA, 20 nt, synthetic construct
  source 1..20: mol_type = other RNA
agcattccaaaaagaaccac

SEQ ID NO: 15346 - RNA, 20 nt, synthetic construct
  source 1..20: mol_type = other RNA
agcattggaaaagtggctgg

SEQ ID NO: 15347 - RNA, 20 nt, synthetic construct
  source 1..20: mol_type = other RNA
agcatttggtgttaaaatgt

SEQ ID NO: 15348 - RNA, 20 nt, synthetic construct
  source 1..20: mol_type = other RNA
agcatttttctagagacaga

SEQ ID NO: 15349 - RNA, 20 nt, synthetic construct
  source 1..20: mol_type = other RNA
agccaactttaagtaaatgg

SEQ ID NO: 15350 - RNA, 20 nt, synthetic construct
  source 1..20: mol_type = other RNA
agccacttttccaatgctca

SEQ ID NO: 15351 - RNA, 20 nt, synthetic construct
  source 1..20: mol_type = other RNA
agccagtaatggagtttcac

SEQ ID NO: 15352 - RNA, 20 nt, synthetic construct
  source 1..20: mol_type = other RNA
agccccagctcaagccttaa

SEQ ID NO: 15353 - RNA, 20 nt, synthetic construct
  source 1..20: mol_type = other RNA
agccccggacttgttctgtg

SEQ ID NO: 15354 - RNA, 20 nt, synthetic construct
  source 1..20: mol_type = other RNA
agccgaaagattggacaccc

SEQ ID NO: 15355 - RNA, 20 nt, synthetic construct
  source 1..20: mol_type = other RNA
agcctaaatttctgtcctac

SEQ ID NO: 15356 - RNA, 20 nt, synthetic construct
  source 1..20: mol_type = other RNA
agcctggggagagagggtga

SEQ ID NO: 15357 - RNA, 20 nt, synthetic construct
  source 1..20: mol_type = other RNA
agcctggtgtctcgcgaaac

SEQ ID NO: 15358 - RNA, 20 nt, synthetic construct
  source 1..20: mol_type = other RNA
agccttaatttgtggtggaa

SEQ ID NO: 15359 - RNA, 20 nt, synthetic construct
  source 1..20: mol_type = other RNA
agcgacatgtaaatgtcttt

SEQ ID NO: 15360 - RNA, 20 nt, synthetic construct
  source 1..20: mol_type = other RNA
agcgttaatgagtttggatt

SEQ ID NO: 15361 - RNA, 20 nt, synthetic construct
  source 1..20: mol_type = other RNA
agctaaggaaaaaggataaa

SEQ ID NO: 15362 - RNA, 20 nt, synthetic construct
  source 1..20: mol_type = other RNA
agctaagtccaacaaaccat

SEQ ID NO: 15363 - RNA, 20 nt, synthetic construct
  source 1..20: mol_type = other RNA
agctacatagttaaatatat

SEQ ID NO: 15364 - RNA, 20 nt, synthetic construct
  source 1..20: mol_type = other RNA
agctagtgctatgtctgaat

SEQ ID NO: 15365 - RNA, 20 nt, synthetic construct
  source 1..20: mol_type = other RNA
agctatactgtccacagttg

SEQ ID NO: 15366 - RNA, 20 nt, synthetic construct
  source 1..20: mol_type = other RNA
agctatcacacaggcatctg

SEQ ID NO: 15367 - RNA, 20 nt, synthetic construct
  source 1..20: mol_type = other RNA
agctcaagccttaatttgtg

SEQ ID NO: 15368 - RNA, 20 nt, synthetic construct
  source 1..20: mol_type = other RNA
agctcagaatagttaaggta

SEQ ID NO: 15369 - RNA, 20 nt, synthetic construct
  source 1..20: mol_type = other RNA
agctcaggagtacaagacac

SEQ ID NO: 15370 - RNA, 20 nt, synthetic construct
  source 1..20: mol_type = other RNA
agctcctagtatactctgat

SEQ ID NO: 15371 - RNA, 20 nt, synthetic construct
  source 1..20: mol_type = other RNA
agctcctccaatcaagtgtt

SEQ ID NO: 15372 - RNA, 20 nt, synthetic construct
  source 1..20: mol_type = other RNA
agctcctgtaacagtttaat

SEQ ID NO: 15373 - RNA, 20 nt, synthetic construct
  source 1..20: mol_type = other RNA
agctctaagcatcatatctt

SEQ ID NO: 15374 - RNA, 20 nt, synthetic construct
  source 1..20: mol_type = other RNA
agctctctggcccattacat

SEQ ID NO: 15375 - RNA, 20 nt, synthetic construct
  source 1..20: mol_type = other RNA
agctgaaagctaagtccaac

SEQ ID NO: 15376 - RNA, 20 nt, synthetic construct
  source 1..20: mol_type = other RNA
agctgaagctctctggccca

SEQ ID NO: 15377 - RNA, 20 nt, synthetic construct
  source 1..20: mol_type = other RNA
agctgggattctgtccctga

SEQ ID NO: 15378 - RNA, 20 nt, synthetic construct
  source 1..20: mol_type = other RNA
agctggggcttgactcttac

SEQ ID NO: 15379 - RNA, 20 nt, synthetic construct
  source 1..20: mol_type = other RNA
agctgtagccccggacttgt

SEQ ID NO: 15380 - RNA, 20 nt, synthetic construct
  source 1..20: mol_type = other RNA
agctgtcctgggtcccatgc

SEQ ID NO: 15381 - RNA, 20 nt, synthetic construct
  source 1..20: mol_type = other RNA
agctgtcctttatatgtggc

SEQ ID NO: 15382 - RNA, 20 nt, synthetic construct
  source 1..20: mol_type = other RNA
agctgttaaattgaggaaag

SEQ ID NO: 15383 - RNA, 20 nt, synthetic construct
  source 1..20: mol_type = other RNA
agcttcagcttttatttcct

SEQ ID NO: 15384 - RNA, 20 nt, synthetic construct
  source 1..20: mol_type = other RNA
agcttccaaattgctgtctc

SEQ ID NO: 15385 - RNA, 20 nt, synthetic construct
  source 1..20: mol_type = other RNA
agctttctccctctcttgat

SEQ ID NO: 15386 - RNA, 20 nt, synthetic construct
  source 1..20: mol_type = other RNA
agcttttatttccttactgc

SEQ ID NO: 15387 - RNA, 20 nt, synthetic construct
  source 1..20: mol_type = other RNA
agcttttgcttgagaaacca

SEQ ID NO: 15388 - RNA, 20 nt, synthetic construct
  source 1..20: mol_type = other RNA
agctttttcatttttcacta

SEQ ID NO: 15389 - RNA, 20 nt, synthetic construct
  source 1..20: mol_type = other RNA
agctttttgaaggaatagtg

SEQ ID NO: 15390 - RNA, 20 nt, synthetic construct
  source 1..20: mol_type = other RNA
aggaaaaaggataaaatgaa

SEQ ID NO: 15391 - RNA, 20 nt, synthetic construct
  source 1..20: mol_type = other RNA
aggaaagtctatccagggac

SEQ ID NO: 15392 - RNA, 20 nt, synthetic construct
  source 1..20: mol_type = other RNA
aggaaataaaagctgaagct

SEQ ID NO: 15393 - RNA, 20 nt, synthetic construct
  source 1..20: mol_type = other RNA
aggaagaaaaagggagatgt

SEQ ID NO: 15394 - RNA, 20 nt, synthetic construct
  source 1..20: mol_type = other RNA
aggaagatagagcatgaaaa

SEQ ID NO: 15395 - RNA, 20 nt, synthetic construct
  source 1..20: mol_type = other RNA
aggaagtgaaaacttgtagg

SEQ ID NO: 15396 - RNA, 20 nt, synthetic construct
  source 1..20: mol_type = other RNA
aggaataaaagcactgctgg

SEQ ID NO: 15397 - RNA, 20 nt, synthetic construct
  source 1..20: mol_type = other RNA
aggaatagtgtcttgtactc

SEQ ID NO: 15398 - RNA, 20 nt, synthetic construct
  source 1..20: mol_type = other RNA
aggaattataataccaacat

SEQ ID NO: 15399 - RNA, 20 nt, synthetic construct
  source 1..20: mol_type = other RNA
aggacaatcatcctaacaag

SEQ ID NO: 15400 - RNA, 20 nt, synthetic construct
  source 1..20: mol_type = other RNA
aggacagaaatttaggctgg

SEQ ID NO: 15401 - RNA, 20 nt, synthetic construct
  source 1..20: mol_type = other RNA
aggagagaggtcatatttgt

SEQ ID NO: 15402 - RNA, 20 nt, synthetic construct
  source 1..20: mol_type = other RNA
aggagcaagtacaacaaatg

SEQ ID NO: 15403 - RNA, 20 nt, synthetic construct
  source 1..20: mol_type = other RNA
aggagctacatagttaaata

SEQ ID NO: 15404 - RNA, 20 nt, synthetic construct
  source 1..20: mol_type = other RNA
aggagctcaggagtacaaga

SEQ ID NO: 15405 - RNA, 20 nt, synthetic construct
  source 1..20: mol_type = other RNA
aggagctctaagcatcatat

SEQ ID NO: 15406 - RNA, 20 nt, synthetic construct
  source 1..20: mol_type = other RNA
aggagtacaagacactattc

SEQ ID NO: 15407 - RNA, 20 nt, synthetic construct
  source 1..20: mol_type = other RNA
aggagtcagaagaaaactgc

SEQ ID NO: 15408 - RNA, 20 nt, synthetic construct
  source 1..20: mol_type = other RNA
aggataaaacttactttgtg

SEQ ID NO: 15409 - RNA, 20 nt, synthetic construct
  source 1..20: mol_type = other RNA
aggatgaattctgttctcgt

SEQ ID NO: 15410 - RNA, 20 nt, synthetic construct
  source 1..20: mol_type = other RNA
aggatgattgtcctaaagga

SEQ ID NO: 15411 - RNA, 20 nt, synthetic construct
  source 1..20: mol_type = other RNA
aggattaaaagcagcaaggg

SEQ ID NO: 15412 - RNA, 20 nt, synthetic construct
  source 1..20: mol_type = other RNA
aggcaacatctccctttttc

SEQ ID NO: 15413 - RNA, 20 nt, synthetic construct
  source 1..20: mol_type = other RNA
aggcacatctttaaaaatgg

SEQ ID NO: 15414 - RNA, 20 nt, synthetic construct
  source 1..20: mol_type = other RNA
aggcaggcacatctttaaaa

SEQ ID NO: 15415 - RNA, 20 nt, synthetic construct
  source 1..20: mol_type = other RNA
aggcatctgagatcagttac

SEQ ID NO: 15416 - RNA, 20 nt, synthetic construct
  source 1..20: mol_type = other RNA
aggcatcttagcaactctca

SEQ ID NO: 15417 - RNA, 20 nt, synthetic construct
  source 1..20: mol_type = other RNA
aggcatgaccaaaggggaga

SEQ ID NO: 15418 - RNA, 20 nt, synthetic construct
  source 1..20: mol_type = other RNA
aggctacccaagatcaagag

SEQ ID NO: 15419 - RNA, 20 nt, synthetic construct
  source 1..20: mol_type = other RNA
aggctctctacccctttgca

SEQ ID NO: 15420 - RNA, 20 nt, synthetic construct
  source 1..20: mol_type = other RNA
aggctgggttcatttgtatc

SEQ ID NO: 15421 - RNA, 20 nt, synthetic construct
  source 1..20: mol_type = other RNA
aggcttgagctggggcttga

SEQ ID NO: 15422 - RNA, 20 nt, synthetic construct
  source 1..20: mol_type = other RNA
agggaagcactggtttctca

SEQ ID NO: 15423 - RNA, 20 nt, synthetic construct
  source 1..20: mol_type = other RNA
agggacagaatcccagctaa

SEQ ID NO: 15424 - RNA, 20 nt, synthetic construct
  source 1..20: mol_type = other RNA
agggaccttatgcatcacat

SEQ ID NO: 15425 - RNA, 20 nt, synthetic construct
  source 1..20: mol_type = other RNA
agggagaaagctagtgctat

SEQ ID NO: 15426 - RNA, 20 nt, synthetic construct
  source 1..20: mol_type = other RNA
agggagatgttgcctaacct

SEQ ID NO: 15427 - RNA, 20 nt, synthetic construct
  source 1..20: mol_type = other RNA
agggaggaataaaagcactg

SEQ ID NO: 15428 - RNA, 20 nt, synthetic construct
  source 1..20: mol_type = other RNA
agggagggaagcactggttt

SEQ ID NO: 15429 - RNA, 20 nt, synthetic construct
  source 1..20: mol_type = other RNA
agggaggtgagattccatta

SEQ ID NO: 15430 - RNA, 20 nt, synthetic construct
  source 1..20: mol_type = other RNA
agggatgcaaaggggtagag

SEQ ID NO: 15431 - RNA, 20 nt, synthetic construct
  source 1..20: mol_type = other RNA
agggcagtttgggtcataga

SEQ ID NO: 15432 - RNA, 20 nt, synthetic construct
  source 1..20: mol_type = other RNA
aggggagatgacatttgaat

SEQ ID NO: 15433 - RNA, 20 nt, synthetic construct
  source 1..20: mol_type = other RNA
aggggtagagagcctgggga

SEQ ID NO: 15434 - RNA, 20 nt, synthetic construct
  source 1..20: mol_type = other RNA
agggtagcattccaaaaaga

SEQ ID NO: 15435 - RNA, 20 nt, synthetic construct
  source 1..20: mol_type = other RNA
agggtctcaaatggtataaa

SEQ ID NO: 15436 - RNA, 20 nt, synthetic construct
  source 1..20: mol_type = other RNA
agggtgagggagggaagcac

SEQ ID NO: 15437 - RNA, 20 nt, synthetic construct
  source 1..20: mol_type = other RNA
aggtaatttaaatcagcaat

SEQ ID NO: 15438 - RNA, 20 nt, synthetic construct
  source 1..20: mol_type = other RNA
aggtatttagaggaagaaaa

SEQ ID NO: 15439 - RNA, 20 nt, synthetic construct
  source 1..20: mol_type = other RNA
aggtcatatttgtgtgtgta

SEQ ID NO: 15440 - RNA, 20 nt, synthetic construct
  source 1..20: mol_type = other RNA
aggtccctggatagactttc

SEQ ID NO: 15441 - RNA, 20 nt, synthetic construct
  source 1..20: mol_type = other RNA
aggtctgtgtgatacaaatg

SEQ ID NO: 15442 - RNA, 20 nt, synthetic construct
  source 1..20: mol_type = other RNA
aggtgaaactccattactgg

SEQ ID NO: 15443 - RNA, 20 nt, synthetic construct
  source 1..20: mol_type = other RNA
aggtgagattccattaaact

SEQ ID NO: 15444 - RNA, 20 nt, synthetic construct
  source 1..20: mol_type = other RNA
aggtgatcatgctttatgtc

SEQ ID NO: 15445 - RNA, 20 nt, synthetic construct
  source 1..20: mol_type = other RNA
aggtgatcttgactactgct

SEQ ID NO: 15446 - RNA, 20 nt, synthetic construct
  source 1..20: mol_type = other RNA
aggttaggcaacatctccct

SEQ ID NO: 15447 - RNA, 20 nt, synthetic construct
  source 1..20: mol_type = other RNA
agtaaaaagagaaaaccatc

SEQ ID NO: 15448 - RNA, 20 nt, synthetic construct
  source 1..20: mol_type = other RNA
agtaaatggagtgagcgaca

SEQ ID NO: 15449 - RNA, 20 nt, synthetic construct
  source 1..20: mol_type = other RNA
agtaactgatctcagatgcc

SEQ ID NO: 15450 - RNA, 20 nt, synthetic construct
  source 1..20: mol_type = other RNA
agtaaggaaataaaagctga

SEQ ID NO: 15451 - RNA, 20 nt, synthetic construct
  source 1..20: mol_type = other RNA
agtaagttttatcctgagga

SEQ ID NO: 15452 - RNA, 20 nt, synthetic construct
  source 1..20: mol_type = other RNA
agtaatggagtttcacctgt

SEQ ID NO: 15453 - RNA, 20 nt, synthetic construct
  source 1..20: mol_type = other RNA
agtaattctggggttgttgt

SEQ ID NO: 15454 - RNA, 20 nt, synthetic construct
  source 1..20: mol_type = other RNA
agtacaaactgctcaggagt

SEQ ID NO: 15455 - RNA, 20 nt, synthetic construct
  source 1..20: mol_type = other RNA
agtacaacaaatggaaaatg

SEQ ID NO: 15456 - RNA, 20 nt, synthetic construct
  source 1..20: mol_type = other RNA
agtacaagacactattcctt

SEQ ID NO: 15457 - RNA, 20 nt, synthetic construct
  source 1..20: mol_type = other RNA
agtacaagccagtaatggag

SEQ ID NO: 15458 - RNA, 20 nt, synthetic construct
  source 1..20: mol_type = other RNA
agtagtcaagatcacctgga

SEQ ID NO: 15459 - RNA, 20 nt, synthetic construct
  source 1..20: mol_type = other RNA
agtagtgataatccgcagtc

SEQ ID NO: 15460 - RNA, 20 nt, synthetic construct
  source 1..20: mol_type = other RNA
agtatactaggagctcagga

SEQ ID NO: 15461 - RNA, 20 nt, synthetic construct
  source 1..20: mol_type = other RNA
agtatactctgatgtctagc

SEQ ID NO: 15462 - RNA, 20 nt, synthetic construct
  source 1..20: mol_type = other RNA
agtatagctgtagccccgga

SEQ ID NO: 15463 - RNA, 20 nt, synthetic construct
  source 1..20: mol_type = other RNA
agtatgagtgagagttgcta

SEQ ID NO: 15464 - RNA, 20 nt, synthetic construct
  source 1..20: mol_type = other RNA
agtatgtggaaaatagtgaa

SEQ ID NO: 15465 - RNA, 20 nt, synthetic construct
  source 1..20: mol_type = other RNA
agtattcagacatagcacta

SEQ ID NO: 15466 - RNA, 20 nt, synthetic construct
  source 1..20: mol_type = other RNA
agtcaagatcacctggactg

SEQ ID NO: 15467 - RNA, 20 nt, synthetic construct
  source 1..20: mol_type = other RNA
agtcaagccccagctcaagc

SEQ ID NO: 15468 - RNA, 20 nt, synthetic construct
  source 1..20: mol_type = other RNA
agtcacatggaatgaattgc

SEQ ID NO: 15469 - RNA, 20 nt, synthetic construct
  source 1..20: mol_type = other RNA
agtcagaagaaaactgcttt

SEQ ID NO: 15470 - RNA, 20 nt, synthetic construct
  source 1..20: mol_type = other RNA
agtcataccagccacttttc

SEQ ID NO: 15471 - RNA, 20 nt, synthetic construct
  source 1..20: mol_type = other RNA
agtccaacaaaccattttta

SEQ ID NO: 15472 - RNA, 20 nt, synthetic construct
  source 1..20: mol_type = other RNA
agtccaggtgatcttgacta

SEQ ID NO: 15473 - RNA, 20 nt, synthetic construct
  source 1..20: mol_type = other RNA
agtccggggctacagctata

SEQ ID NO: 15474 - RNA, 20 nt, synthetic construct
  source 1..20: mol_type = other RNA
agtctatccagggaccttat

SEQ ID NO: 15475 - RNA, 20 nt, synthetic construct
  source 1..20: mol_type = other RNA
agtgaaaaatgaaaaagctg

SEQ ID NO: 15476 - RNA, 20 nt, synthetic construct
  source 1..20: mol_type = other RNA
agtgaaaacttgtaggacag

SEQ ID NO: 15477 - RNA, 20 nt, synthetic construct
  source 1..20: mol_type = other RNA
agtgaaagcaagcgttaatg

SEQ ID NO: 15478 - RNA, 20 nt, synthetic construct
  source 1..20: mol_type = other RNA
agtgagagttgctaagatgc

SEQ ID NO: 15479 - RNA, 20 nt, synthetic construct
  source 1..20: mol_type = other RNA
agtgagcgacatgtaaatgt

SEQ ID NO: 15480 - RNA, 20 nt, synthetic construct
  source 1..20: mol_type = other RNA
agtgctatgtctgaatacta

SEQ ID NO: 15481 - RNA, 20 nt, synthetic construct
  source 1..20: mol_type = other RNA
agtgcttccctccctcaccc

SEQ ID NO: 15482 - RNA, 20 nt, synthetic construct
  source 1..20: mol_type = other RNA
agtgcttttattcctcccta

SEQ ID NO: 15483 - RNA, 20 nt, synthetic construct
  source 1..20: mol_type = other RNA
agtggctggtatgactaaag

SEQ ID NO: 15484 - RNA, 20 nt, synthetic construct
  source 1..20: mol_type = other RNA
agtgtagcatcaggttaaat

SEQ ID NO: 15485 - RNA, 20 nt, synthetic construct
  source 1..20: mol_type = other RNA
agtgtcttgtactcctgagc

SEQ ID NO: 15486 - RNA, 20 nt, synthetic construct
  source 1..20: mol_type = other RNA
agtgttatcttttgatccat

SEQ ID NO: 15487 - RNA, 20 nt, synthetic construct
  source 1..20: mol_type = other RNA
agtgtttccaggaagtgaaa

SEQ ID NO: 15488 - RNA, 20 nt, synthetic construct
  source 1..20: mol_type = other RNA
agttaaatatatcagaactt

SEQ ID NO: 15489 - RNA, 20 nt, synthetic construct
  source 1..20: mol_type = other RNA
agttaaatgaaatgtaatgg

SEQ ID NO: 15490 - RNA, 20 nt, synthetic construct
  source 1..20: mol_type = other RNA
agttaaggtaatttaaatca

SEQ ID NO: 15491 - RNA, 20 nt, synthetic construct
  source 1..20: mol_type = other RNA
agttacccaaatcatagaga

SEQ ID NO: 15492 - RNA, 20 nt, synthetic construct
  source 1..20: mol_type = other RNA
agttactaactggtaagaac

SEQ ID NO: 15493 - RNA, 20 nt, synthetic construct
  source 1..20: mol_type = other RNA
agttagtaactgatctcaga

SEQ ID NO: 15494 - RNA, 20 nt, synthetic construct
  source 1..20: mol_type = other RNA
agttatagaaaacaatcaca

SEQ ID NO: 15495 - RNA, 20 nt, synthetic construct
  source 1..20: mol_type = other RNA
agttcacgttcttaaatgtt

SEQ ID NO: 15496 - RNA, 20 nt, synthetic construct
  source 1..20: mol_type = other RNA
agttctgatatatttaacta

SEQ ID NO: 15497 - RNA, 20 nt, synthetic construct
  source 1..20: mol_type = other RNA
agttcttgcagtgtggccca

SEQ ID NO: 15498 - RNA, 20 nt, synthetic construct
  source 1..20: mol_type = other RNA
agttctttagtcataccagc

SEQ ID NO: 15499 - RNA, 20 nt, synthetic construct
  source 1..20: mol_type = other RNA
agttgctaagatgcctggta

SEQ ID NO: 15500 - RNA, 20 nt, synthetic construct
  source 1..20: mol_type = other RNA
agttggctagacatcagagt

SEQ ID NO: 15501 - RNA, 20 nt, synthetic construct
  source 1..20: mol_type = other RNA
agttgtctaacccgcgggcc

SEQ ID NO: 15502 - RNA, 20 nt, synthetic construct
  source 1..20: mol_type = other RNA
agtttaatggaatctcacct

SEQ ID NO: 15503 - RNA, 20 nt, synthetic construct
  source 1..20: mol_type = other RNA
agtttcacctgtcattttca

SEQ ID NO: 15504 - RNA, 20 nt, synthetic construct
  source 1..20: mol_type = other RNA
agtttgggtcatagaacaac

SEQ ID NO: 15505 - RNA, 20 nt, synthetic construct
  source 1..20: mol_type = other RNA
agtttgtactgcgtgggtca

SEQ ID NO: 15506 - RNA, 20 nt, synthetic construct
  source 1..20: mol_type = other RNA
agttttataccatttgagac

SEQ ID NO: 15507 - RNA, 20 nt, synthetic construct
  source 1..20: mol_type = other RNA
agttttatcctgaggaatta

SEQ ID NO: 15508 - RNA, 20 nt, synthetic construct
  source 1..20: mol_type = other RNA
agttttcacttcctggaaac

SEQ ID NO: 15509 - RNA, 20 nt, synthetic construct
  source 1..20: mol_type = other RNA
agttttcttctgactcctga

SEQ ID NO: 15510 - RNA, 20 nt, synthetic construct
  source 1..20: mol_type = other RNA
ataaaaagcatttggtgtta

SEQ ID NO: 15511 - RNA, 20 nt, synthetic construct
  source 1..20: mol_type = other RNA
ataaaaattcagttctttag

SEQ ID NO: 15512 - RNA, 20 nt, synthetic construct
  source 1..20: mol_type = other RNA
ataaaactcaggtgatcatg

SEQ ID NO: 15513 - RNA, 20 nt, synthetic construct
  source 1..20: mol_type = other RNA
ataaaagcactgctgggtaa

SEQ ID NO: 15514 - RNA, 20 nt, synthetic construct
  source 1..20: mol_type = other RNA
ataaaagctgaagctctctg

SEQ ID NO: 15515 - RNA, 20 nt, synthetic construct
  source 1..20: mol_type = other RNA
ataaacatttaagaacgtga

SEQ ID NO: 15516 - RNA, 20 nt, synthetic construct
  source 1..20: mol_type = other RNA
ataaagacatttacatgtcg

SEQ ID NO: 15517 - RNA, 20 nt, synthetic construct
  source 1..20: mol_type = other RNA
ataaagcatgatcacctgag

SEQ ID NO: 15518 - RNA, 20 nt, synthetic construct
  source 1..20: mol_type = other RNA
ataacactaaagacagagac

SEQ ID NO: 15519 - RNA, 20 nt, synthetic construct
  source 1..20: mol_type = other RNA
ataactcaagatatgatgct

SEQ ID NO: 15520 - RNA, 20 nt, synthetic construct
  source 1..20: mol_type = other RNA
ataaggtccctggatagact

SEQ ID NO: 15521 - RNA, 20 nt, synthetic construct
  source 1..20: mol_type = other RNA
ataagtagtgataatccgca

SEQ ID NO: 15522 - RNA, 20 nt, synthetic construct
  source 1..20: mol_type = other RNA
ataataccaacattttaaca

SEQ ID NO: 15523 - RNA, 20 nt, synthetic construct
  source 1..20: mol_type = other RNA
ataatgaattttagggaggt

SEQ ID NO: 15524 - RNA, 20 nt, synthetic construct
  source 1..20: mol_type = other RNA
ataattcctcaggataaaac

SEQ ID NO: 15525 - RNA, 20 nt, synthetic construct
  source 1..20: mol_type = other RNA
atacaaatgaacccagccta

SEQ ID NO: 15526 - RNA, 20 nt, synthetic construct
  source 1..20: mol_type = other RNA
ataccaacattttaacacca

SEQ ID NO: 15527 - RNA, 20 nt, synthetic construct
  source 1..20: mol_type = other RNA
ataccagccacttttccaat

SEQ ID NO: 15528 - RNA, 20 nt, synthetic construct
  source 1..20: mol_type = other RNA
ataccatttgagacccttgc

SEQ ID NO: 15529 - RNA, 20 nt, synthetic construct
  source 1..20: mol_type = other RNA
atacctctcatttctgttct

SEQ ID NO: 15530 - RNA, 20 nt, synthetic construct
  source 1..20: mol_type = other RNA
atacgtggacattgatggtt

SEQ ID NO: 15531 - RNA, 20 nt, synthetic construct
  source 1..20: mol_type = other RNA
atactacacacacaaatatg

SEQ ID NO: 15532 - RNA, 20 nt, synthetic construct
  source 1..20: mol_type = other RNA
atactagaggagcaagtaca

SEQ ID NO: 15533 - RNA, 20 nt, synthetic construct
  source 1..20: mol_type = other RNA
atactaggagctcaggagta

SEQ ID NO: 15534 - RNA, 20 nt, synthetic construct
  source 1..20: mol_type = other RNA
atactctgatgtctagccaa

SEQ ID NO: 15535 - RNA, 20 nt, synthetic construct
  source 1..20: mol_type = other RNA
atactgtccacagttgcaat

SEQ ID NO: 15536 - RNA, 20 nt, synthetic construct
  source 1..20: mol_type = other RNA
atacttgatcccattttcca

SEQ ID NO: 15537 - RNA, 20 nt, synthetic construct
  source 1..20: mol_type = other RNA
atagaaaaattttagctttt

SEQ ID NO: 15538 - RNA, 20 nt, synthetic construct
  source 1..20: mol_type = other RNA
atagaacaacagaccatgga

SEQ ID NO: 15539 - RNA, 20 nt, synthetic construct
  source 1..20: mol_type = other RNA
atagactttcctcaatttaa

SEQ ID NO: 15540 - RNA, 20 nt, synthetic construct
  source 1..20: mol_type = other RNA
atagagacgtcatatatctt

SEQ ID NO: 15541 - RNA, 20 nt, synthetic construct
  source 1..20: mol_type = other RNA
atagagcatgaaaatgacag

SEQ ID NO: 15542 - RNA, 20 nt, synthetic construct
  source 1..20: mol_type = other RNA
atagcactagctttctccct

SEQ ID NO: 15543 - RNA, 20 nt, synthetic construct
  source 1..20: mol_type = other RNA
atagctgtagccccggactt

SEQ ID NO: 15544 - RNA, 20 nt, synthetic construct
  source 1..20: mol_type = other RNA
atagcttccaaattgctgtc

SEQ ID NO: 15545 - RNA, 20 nt, synthetic construct
  source 1..20: mol_type = other RNA
ataggtctgtgtgatacaaa

SEQ ID NO: 15546 - RNA, 20 nt, synthetic construct
  source 1..20: mol_type = other RNA
atagtaattctggggttgtt

SEQ ID NO: 15547 - RNA, 20 nt, synthetic construct
  source 1..20: mol_type = other RNA
atagtgtcttgtactcctga

SEQ ID NO: 15548 - RNA, 20 nt, synthetic construct
  source 1..20: mol_type = other RNA
atagttaaggtaatttaaat

SEQ ID NO: 15549 - RNA, 20 nt, synthetic construct
  source 1..20: mol_type = other RNA
atataaaggacagctgatga

SEQ ID NO: 15550 - RNA, 20 nt, synthetic construct
  source 1..20: mol_type = other RNA
atatatcagaacttgaatga

SEQ ID NO: 15551 - RNA, 20 nt, synthetic construct
  source 1..20: mol_type = other RNA
atatatctttgtggggtggt

SEQ ID NO: 15552 - RNA, 20 nt, synthetic construct
  source 1..20: mol_type = other RNA
atatatgacgtctctatgat

SEQ ID NO: 15553 - RNA, 20 nt, synthetic construct
  source 1..20: mol_type = other RNA
atatatttaactatgtagct

SEQ ID NO: 15554 - RNA, 20 nt, synthetic construct
  source 1..20: mol_type = other RNA
atatatttagctgaaagcta

SEQ ID NO: 15555 - RNA, 20 nt, synthetic construct
  source 1..20: mol_type = other RNA
atatcagaacttgaatgaag

SEQ ID NO: 15556 - RNA, 20 nt, synthetic construct
  source 1..20: mol_type = other RNA
atatcttgagttatagaaaa

SEQ ID NO: 15557 - RNA, 20 nt, synthetic construct
  source 1..20: mol_type = other RNA
atatctttgtggggtggttc

SEQ ID NO: 15558 - RNA, 20 nt, synthetic construct
  source 1..20: mol_type = other RNA
atatgacctctctcctgaag

SEQ ID NO: 15559 - RNA, 20 nt, synthetic construct
  source 1..20: mol_type = other RNA
atatgacgtctctatgattt

SEQ ID NO: 15560 - RNA, 20 nt, synthetic construct
  source 1..20: mol_type = other RNA
atatgatgcttagagctcct

SEQ ID NO: 15561 - RNA, 20 nt, synthetic construct
  source 1..20: mol_type = other RNA
atatgtggcccaagacagtt

SEQ ID NO: 15562 - RNA, 20 nt, synthetic construct
  source 1..20: mol_type = other RNA
atatttaactatgtagctcc

SEQ ID NO: 15563 - RNA, 20 nt, synthetic construct
  source 1..20: mol_type = other RNA
atatttagctgaaagctaag

SEQ ID NO: 15564 - RNA, 20 nt, synthetic construct
  source 1..20: mol_type = other RNA
atatttgtgtgtgtagtatg

SEQ ID NO: 15565 - RNA, 20 nt, synthetic construct
  source 1..20: mol_type = other RNA
atcaaaagataacactaaag

SEQ ID NO: 15566 - RNA, 20 nt, synthetic construct
  source 1..20: mol_type = other RNA
atcaagagagggagaaagct

SEQ ID NO: 15567 - RNA, 20 nt, synthetic construct
  source 1..20: mol_type = other RNA
atcaagataaacatttaaga

SEQ ID NO: 15568 - RNA, 20 nt, synthetic construct
  source 1..20: mol_type = other RNA
atcaagtatgagtgagagtt

SEQ ID NO: 15569 - RNA, 20 nt, synthetic construct
  source 1..20: mol_type = other RNA
atcaagtgtttccaggaagt

SEQ ID NO: 15570 - RNA, 20 nt, synthetic construct
  source 1..20: mol_type = other RNA
atcaatgtccacgtattctg

SEQ ID NO: 15571 - RNA, 20 nt, synthetic construct
  source 1..20: mol_type = other RNA
atcacaaagtaagttttatc

SEQ ID NO: 15572 - RNA, 20 nt, synthetic construct
  source 1..20: mol_type = other RNA
atcacacagacctattcttc

SEQ ID NO: 15573 - RNA, 20 nt, synthetic construct
  source 1..20: mol_type = other RNA
atcacacaggcatctgagat

SEQ ID NO: 15574 - RNA, 20 nt, synthetic construct
  source 1..20: mol_type = other RNA
atcacattcacgagaacaga

SEQ ID NO: 15575 - RNA, 20 nt, synthetic construct
  source 1..20: mol_type = other RNA
atcacctgagttttatacca

SEQ ID NO: 15576 - RNA, 20 nt, synthetic construct
  source 1..20: mol_type = other RNA
atcacctggactgtgaagac

SEQ ID NO: 15577 - RNA, 20 nt, synthetic construct
  source 1..20: mol_type = other RNA
atcactacttatcatttttg

SEQ ID NO: 15578 - RNA, 20 nt, synthetic construct
  source 1..20: mol_type = other RNA
atcagaacttgaatgaagaa

SEQ ID NO: 15579 - RNA, 20 nt, synthetic construct
  source 1..20: mol_type = other RNA
atcagagtatactaggagct

SEQ ID NO: 15580 - RNA, 20 nt, synthetic construct
  source 1..20: mol_type = other RNA
atcagcaatgacaacaaccc

SEQ ID NO: 15581 - RNA, 20 nt, synthetic construct
  source 1..20: mol_type = other RNA
atcagctgtcctttatatgt

SEQ ID NO: 15582 - RNA, 20 nt, synthetic construct
  source 1..20: mol_type = other RNA
atcagttactaactggtaag

SEQ ID NO: 15583 - RNA, 20 nt, synthetic construct
  source 1..20: mol_type = other RNA
atcatagagacgtcatatat

SEQ ID NO: 15584 - RNA, 20 nt, synthetic construct
  source 1..20: mol_type = other RNA
atcatatcttgagttataga

SEQ ID NO: 15585 - RNA, 20 nt, synthetic construct
  source 1..20: mol_type = other RNA
atcatcctaacaagatgtaa

SEQ ID NO: 15586 - RNA, 20 nt, synthetic construct
  source 1..20: mol_type = other RNA
atcatgctttatgtctgtct

SEQ ID NO: 15587 - RNA, 20 nt, synthetic construct
  source 1..20: mol_type = other RNA
atcatttttggagcattttt

SEQ ID NO: 15588 - RNA, 20 nt, synthetic construct
  source 1..20: mol_type = other RNA
atccaaactcattaacgctt

SEQ ID NO: 15589 - RNA, 20 nt, synthetic construct
  source 1..20: mol_type = other RNA
atccaattctctgtaaagca

SEQ ID NO: 15590 - RNA, 20 nt, synthetic construct
  source 1..20: mol_type = other RNA
atccacagaacaagtccggg

SEQ ID NO: 15591 - RNA, 20 nt, synthetic construct
  source 1..20: mol_type = other RNA
atccagggaccttatgcatc

SEQ ID NO: 15592 - RNA, 20 nt, synthetic construct
  source 1..20: mol_type = other RNA
atccatcttacatcttgtta

SEQ ID NO: 15593 - RNA, 20 nt, synthetic construct
  source 1..20: mol_type = other RNA
atcccagctaaggaaaaagg

SEQ ID NO: 15594 - RNA, 20 nt, synthetic construct
  source 1..20: mol_type = other RNA
atcccattttccatttgttg

SEQ ID NO: 15595 - RNA, 20 nt, synthetic construct
  source 1..20: mol_type = other RNA
atccctaccaggcatcttag

SEQ ID NO: 15596 - RNA, 20 nt, synthetic construct
  source 1..20: mol_type = other RNA
atcctaacaagatgtaagat

SEQ ID NO: 15597 - RNA, 20 nt, synthetic construct
  source 1..20: mol_type = other RNA
atcctgaggaattataatac

SEQ ID NO: 15598 - RNA, 20 nt, synthetic construct
  source 1..20: mol_type = other RNA
atcctgcagattcaaatgtc

SEQ ID NO: 15599 - RNA, 20 nt, synthetic construct
  source 1..20: mol_type = other RNA
atcctgtaaaccaggggtgt

SEQ ID NO: 15600 - RNA, 20 nt, synthetic construct
  source 1..20: mol_type = other RNA
atcctttttccttagctggg

SEQ ID NO: 15601 - RNA, 20 nt, synthetic construct
  source 1..20: mol_type = other RNA
atctaatttgaattgcaact

SEQ ID NO: 15602 - RNA, 20 nt, synthetic construct
  source 1..20: mol_type = other RNA
atctcacctccctaaaattc

SEQ ID NO: 15603 - RNA, 20 nt, synthetic construct
  source 1..20: mol_type = other RNA
atctcagatgcctgtgtgat

SEQ ID NO: 15604 - RNA, 20 nt, synthetic construct
  source 1..20: mol_type = other RNA
atctcccctttggtcatgcc

SEQ ID NO: 15605 - RNA, 20 nt, synthetic construct
  source 1..20: mol_type = other RNA
atctccctttttcttcctct

SEQ ID NO: 15606 - RNA, 20 nt, synthetic construct
  source 1..20: mol_type = other RNA
atctgagatcagttactaac

SEQ ID NO: 15607 - RNA, 20 nt, synthetic construct
  source 1..20: mol_type = other RNA
atctgaggttaggcaacatc

SEQ ID NO: 15608 - RNA, 20 nt, synthetic construct
  source 1..20: mol_type = other RNA
atctgcaggattaaaagcag

SEQ ID NO: 15609 - RNA, 20 nt, synthetic construct
  source 1..20: mol_type = other RNA
atctgtctggtttcgcgaga

SEQ ID NO: 15610 - RNA, 20 nt, synthetic construct
  source 1..20: mol_type = other RNA
atcttacatcttgttaggat

SEQ ID NO: 15611 - RNA, 20 nt, synthetic construct
  source 1..20: mol_type = other RNA
atcttagcaactctcactca

SEQ ID NO: 15612 - RNA, 20 nt, synthetic construct
  source 1..20: mol_type = other RNA
atcttcctttaggacaatca

SEQ ID NO: 15613 - RNA, 20 nt, synthetic construct
  source 1..20: mol_type = other RNA
atcttgactactgctttaca

SEQ ID NO: 15614 - RNA, 20 nt, synthetic construct
  source 1..20: mol_type = other RNA
atcttgagcattggaaaagt

SEQ ID NO: 15615 - RNA, 20 nt, synthetic construct
  source 1..20: mol_type = other RNA
atcttgagttatagaaaaca

SEQ ID NO: 15616 - RNA, 20 nt, synthetic construct
  source 1..20: mol_type = other RNA
atcttgattttcattttatc

SEQ ID NO: 15617 - RNA, 20 nt, synthetic construct
  source 1..20: mol_type = other RNA
atcttgggtagcctggtgtc

SEQ ID NO: 15618 - RNA, 20 nt, synthetic construct
  source 1..20: mol_type = other RNA
atcttgttaggatgattgtc

SEQ ID NO: 15619 - RNA, 20 nt, synthetic construct
  source 1..20: mol_type = other RNA
atctttaaaaatggtttgtt

SEQ ID NO: 15620 - RNA, 20 nt, synthetic construct
  source 1..20: mol_type = other RNA
atctttcggcttccctgggc

SEQ ID NO: 15621 - RNA, 20 nt, synthetic construct
  source 1..20: mol_type = other RNA
atctttgtggggtggttctt

SEQ ID NO: 15622 - RNA, 20 nt, synthetic construct
  source 1..20: mol_type = other RNA
atcttttgatccatcttaca

SEQ ID NO: 15623 - RNA, 20 nt, synthetic construct
  source 1..20: mol_type = other RNA
atgaaaaagctgttaaattg

SEQ ID NO: 15624 - RNA, 20 nt, synthetic construct
  source 1..20: mol_type = other RNA
atgaaaatgacaggtgaaac

SEQ ID NO: 15625 - RNA, 20 nt, synthetic construct
  source 1..20: mol_type = other RNA
atgaaatgtaatgggccaga

SEQ ID NO: 15626 - RNA, 20 nt, synthetic construct
  source 1..20: mol_type = other RNA
atgaacccagcctaaatttc

SEQ ID NO: 15627 - RNA, 20 nt, synthetic construct
  source 1..20: mol_type = other RNA
atgaagaataggtctgtgtg

SEQ ID NO: 15628 - RNA, 20 nt, synthetic construct
  source 1..20: mol_type = other RNA
atgaattctgttctcgtgaa

SEQ ID NO: 15629 - RNA, 20 nt, synthetic construct
  source 1..20: mol_type = other RNA
atgaattgcagttacccaaa

SEQ ID NO: 15630 - RNA, 20 nt, synthetic construct
  source 1..20: mol_type = other RNA
atgaattttagggaggtgag

SEQ ID NO: 15631 - RNA, 20 nt, synthetic construct
  source 1..20: mol_type = other RNA
atgacaacaaccccagaatt

SEQ ID NO: 15632 - RNA, 20 nt, synthetic construct
  source 1..20: mol_type = other RNA
atgacaggtgaaactccatt

SEQ ID NO: 15633 - RNA, 20 nt, synthetic construct
  source 1..20: mol_type = other RNA
atgacatttgaatctgcagg

SEQ ID NO: 15634 - RNA, 20 nt, synthetic construct
  source 1..20: mol_type = other RNA
atgaccaaaggggagatgac

SEQ ID NO: 15635 - RNA, 20 nt, synthetic construct
  source 1..20: mol_type = other RNA
atgacccaaactgccctttt

SEQ ID NO: 15636 - RNA, 20 nt, synthetic construct
  source 1..20: mol_type = other RNA
atgacccacgcagtacaaac

SEQ ID NO: 15637 - RNA, 20 nt, synthetic construct
  source 1..20: mol_type = other RNA
atgacctctctcctgaagtc

SEQ ID NO: 15638 - RNA, 20 nt, synthetic construct
  source 1..20: mol_type = other RNA
atgacgtctctatgatttgg

SEQ ID NO: 15639 - RNA, 20 nt, synthetic construct
  source 1..20: mol_type = other RNA
atgagaggtatttagaggaa

SEQ ID NO: 15640 - RNA, 20 nt, synthetic construct
  source 1..20: mol_type = other RNA
atgagtgagagttgctaaga

SEQ ID NO: 15641 - RNA, 20 nt, synthetic construct
  source 1..20: mol_type = other RNA
atgataagtagtgataatcc

SEQ ID NO: 15642 - RNA, 20 nt, synthetic construct
  source 1..20: mol_type = other RNA
atgatcacctgagttttata

SEQ ID NO: 15643 - RNA, 20 nt, synthetic construct
  source 1..20: mol_type = other RNA
atgatgcttagagctcctcc

SEQ ID NO: 15644 - RNA, 20 nt, synthetic construct
  source 1..20: mol_type = other RNA
atgattgtcctaaaggaaga

SEQ ID NO: 15645 - RNA, 20 nt, synthetic construct
  source 1..20: mol_type = other RNA
atgatttgggtaactgcaat

SEQ ID NO: 15646 - RNA, 20 nt, synthetic construct
  source 1..20: mol_type = other RNA
atgcaaaggggtagagagcc

SEQ ID NO: 15647 - RNA, 20 nt, synthetic construct
  source 1..20: mol_type = other RNA
atgcataaggtccctggata

SEQ ID NO: 15648 - RNA, 20 nt, synthetic construct
  source 1..20: mol_type = other RNA
atgcataatgaattttaggg

SEQ ID NO: 15649 - RNA, 20 nt, synthetic construct
  source 1..20: mol_type = other RNA
atgcatcacattcacgagaa

SEQ ID NO: 15650 - RNA, 20 nt, synthetic construct
  source 1..20: mol_type = other RNA
atgcctggtagggatgcaaa

SEQ ID NO: 15651 - RNA, 20 nt, synthetic construct
  source 1..20: mol_type = other RNA
atgcctgtgtgatagcttcc

SEQ ID NO: 15652 - RNA, 20 nt, synthetic construct
  source 1..20: mol_type = other RNA
atgccttccatggtctgttg

SEQ ID NO: 15653 - RNA, 20 nt, synthetic construct
  source 1..20: mol_type = other RNA
atgcggcccgcgggttagac

SEQ ID NO: 15654 - RNA, 20 nt, synthetic construct
  source 1..20: mol_type = other RNA
atgctacactttggtggtgc

SEQ ID NO: 15655 - RNA, 20 nt, synthetic construct
  source 1..20: mol_type = other RNA
atgctacccttgctgctttt

SEQ ID NO: 15656 - RNA, 20 nt, synthetic construct
  source 1..20: mol_type = other RNA
atgctcaagattaataaaat

SEQ ID NO: 15657 - RNA, 20 nt, synthetic construct
  source 1..20: mol_type = other RNA
atgctccaaaaatgataagt

SEQ ID NO: 15658 - RNA, 20 nt, synthetic construct
  source 1..20: mol_type = other RNA
atgctctatcttcctttagg

SEQ ID NO: 15659 - RNA, 20 nt, synthetic construct
  source 1..20: mol_type = other RNA
atgcttagagctcctccaat

SEQ ID NO: 15660 - RNA, 20 nt, synthetic construct
  source 1..20: mol_type = other RNA
atgctttatgtctgtctcta

SEQ ID NO: 15661 - RNA, 20 nt, synthetic construct
  source 1..20: mol_type = other RNA
atgctttttatattgctaat

SEQ ID NO: 15662 - RNA, 20 nt, synthetic construct
  source 1..20: mol_type = other RNA
atggaaaatgggatcaagta

SEQ ID NO: 15663 - RNA, 20 nt, synthetic construct
  source 1..20: mol_type = other RNA
atggaaggcatgaccaaagg

SEQ ID NO: 15664 - RNA, 20 nt, synthetic construct
  source 1..20: mol_type = other RNA
atggaatctcacctccctaa

SEQ ID NO: 15665 - RNA, 20 nt, synthetic construct
  source 1..20: mol_type = other RNA
atggaatgaattgcagttac

SEQ ID NO: 15666 - RNA, 20 nt, synthetic construct
  source 1..20: mol_type = other RNA
atggagtgagcgacatgtaa

SEQ ID NO: 15667 - RNA, 20 nt, synthetic construct
  source 1..20: mol_type = other RNA
atggagtttcacctgtcatt

SEQ ID NO: 15668 - RNA, 20 nt, synthetic construct
  source 1..20: mol_type = other RNA
atggatcaaaagataacact

SEQ ID NO: 15669 - RNA, 20 nt, synthetic construct
  source 1..20: mol_type = other RNA
atgggacccaggacagcttt

SEQ ID NO: 15670 - RNA, 20 nt, synthetic construct
  source 1..20: mol_type = other RNA
atgggatcaagtatgagtga

SEQ ID NO: 15671 - RNA, 20 nt, synthetic construct
  source 1..20: mol_type = other RNA
atgggccagagagcttcagc

SEQ ID NO: 15672 - RNA, 20 nt, synthetic construct
  source 1..20: mol_type = other RNA
atggtataaaactcaggtga

SEQ ID NO: 15673 - RNA, 20 nt, synthetic construct
  source 1..20: mol_type = other RNA
atggtctgttgttctatgac

SEQ ID NO: 15674 - RNA, 20 nt, synthetic construct
  source 1..20: mol_type = other RNA
atggtttgacattttattaa

SEQ ID NO: 15675 - RNA, 20 nt, synthetic construct
  source 1..20: mol_type = other RNA
atggtttgttggacttagct

SEQ ID NO: 15676 - RNA, 20 nt, synthetic construct
  source 1..20: mol_type = other RNA
atggttttctctttttactg

SEQ ID NO: 15677 - RNA, 20 nt, synthetic construct
  source 1..20: mol_type = other RNA
atgtaaatgtctttatggtt

SEQ ID NO: 15678 - RNA, 20 nt, synthetic construct
  source 1..20: mol_type = other RNA
atgtaagatggatcaaaaga

SEQ ID NO: 15679 - RNA, 20 nt, synthetic construct
  source 1..20: mol_type = other RNA
atgtaatgggccagagagct

SEQ ID NO: 15680 - RNA, 20 nt, synthetic construct
  source 1..20: mol_type = other RNA
atgtagctcctgtaacagtt

SEQ ID NO: 15681 - RNA, 20 nt, synthetic construct
  source 1..20: mol_type = other RNA
atgtcaaaccataaagacat

SEQ ID NO: 15682 - RNA, 20 nt, synthetic construct
  source 1..20: mol_type = other RNA
atgtcatctcccctttggtc

SEQ ID NO: 15683 - RNA, 20 nt, synthetic construct
  source 1..20: mol_type = other RNA
atgtccacgtattctgtaat

SEQ ID NO: 15684 - RNA, 20 nt, synthetic construct
  source 1..20: mol_type = other RNA
atgtcgctcactccatttac

SEQ ID NO: 15685 - RNA, 20 nt, synthetic construct
  source 1..20: mol_type = other RNA
atgtctagccaactttaagt

SEQ ID NO: 15686 - RNA, 20 nt, synthetic construct
  source 1..20: mol_type = other RNA
atgtctgaatactagaggag

SEQ ID NO: 15687 - RNA, 20 nt, synthetic construct
  source 1..20: mol_type = other RNA
atgtctgtctctagaaaaat

SEQ ID NO: 15688 - RNA, 20 nt, synthetic construct
  source 1..20: mol_type = other RNA
atgtgacttcaggagagagg

SEQ ID NO: 15689 - RNA, 20 nt, synthetic construct
  source 1..20: mol_type = other RNA
atgtgatgcataaggtccct

SEQ ID NO: 15690 - RNA, 20 nt, synthetic construct
  source 1..20: mol_type = other RNA
atgtgcctgccttggacaac

SEQ ID NO: 15691 - RNA, 20 nt, synthetic construct
  source 1..20: mol_type = other RNA
atgtggaaaatagtgaaaaa

SEQ ID NO: 15692 - RNA, 20 nt, synthetic construct
  source 1..20: mol_type = other RNA
atgtggcccaagacagttct

SEQ ID NO: 15693 - RNA, 20 nt, synthetic construct
  source 1..20: mol_type = other RNA
atgttgcctaacctcagatc

SEQ ID NO: 15694 - RNA, 20 nt, synthetic construct
  source 1..20: mol_type = other RNA
atgttggtattataattcct

SEQ ID NO: 15695 - RNA, 20 nt, synthetic construct
  source 1..20: mol_type = other RNA
attaaaagcagcaagggtag

SEQ ID NO: 15696 - RNA, 20 nt, synthetic construct
  source 1..20: mol_type = other RNA
attaaactgttacaggagct

SEQ ID NO: 15697 - RNA, 20 nt, synthetic construct
  source 1..20: mol_type = other RNA
attaacgcttgctttcactg

SEQ ID NO: 15698 - RNA, 20 nt, synthetic construct
  source 1..20: mol_type = other RNA
attaagatttaacctgatgc

SEQ ID NO: 15699 - RNA, 20 nt, synthetic construct
  source 1..20: mol_type = other RNA
attaaggcttgagctggggc

SEQ ID NO: 15700 - RNA, 20 nt, synthetic construct
  source 1..20: mol_type = other RNA
attaatcttgagcattggaa

SEQ ID NO: 15701 - RNA, 20 nt, synthetic construct
  source 1..20: mol_type = other RNA
attacagaatacgtggacat

SEQ ID NO: 15702 - RNA, 20 nt, synthetic construct
  source 1..20: mol_type = other RNA
attacatttcatttaactgc

SEQ ID NO: 15703 - RNA, 20 nt, synthetic construct
  source 1..20: mol_type = other RNA
attaccttaactattctgag

SEQ ID NO: 15704 - RNA, 20 nt, synthetic construct
  source 1..20: mol_type = other RNA
attactatgacccacgcagt

SEQ ID NO: 15705 - RNA, 20 nt, synthetic construct
  source 1..20: mol_type = other RNA
attactggcttgtactgttt

SEQ ID NO: 15706 - RNA, 20 nt, synthetic construct
  source 1..20: mol_type = other RNA
attagcaatataaaaagcat

SEQ ID NO: 15707 - RNA, 20 nt, synthetic construct
  source 1..20: mol_type = other RNA
attataattcctcaggataa

SEQ ID NO: 15708 - RNA, 20 nt, synthetic construct
  source 1..20: mol_type = other RNA
attatatatttagctgaaag

SEQ ID NO: 15709 - RNA, 20 nt, synthetic construct
  source 1..20: mol_type = other RNA
attatcactacttatcattt

SEQ ID NO: 15710 - RNA, 20 nt, synthetic construct
  source 1..20: mol_type = other RNA
attcaaagctgtcctgggtc

SEQ ID NO: 15711 - RNA, 20 nt, synthetic construct
  source 1..20: mol_type = other RNA
attcaaatgtcatctcccct

SEQ ID NO: 15712 - RNA, 20 nt, synthetic construct
  source 1..20: mol_type = other RNA
attcacgagaacagaattca

SEQ ID NO: 15713 - RNA, 20 nt, synthetic construct
  source 1..20: mol_type = other RNA
attcagacatagcactagct

SEQ ID NO: 15714 - RNA, 20 nt, synthetic construct
  source 1..20: mol_type = other RNA
attcagttctttagtcatac

SEQ ID NO: 15715 - RNA, 20 nt, synthetic construct
  source 1..20: mol_type = other RNA
attcatcctgtaaaccaggg

SEQ ID NO: 15716 - RNA, 20 nt, synthetic construct
  source 1..20: mol_type = other RNA
attcattccatgtgacttca

SEQ ID NO: 15717 - RNA, 20 nt, synthetic construct
  source 1..20: mol_type = other RNA
attccaaaaagaaccacccc

SEQ ID NO: 15718 - RNA, 20 nt, synthetic construct
  source 1..20: mol_type = other RNA
attccatgtgacttcaggag

SEQ ID NO: 15719 - RNA, 20 nt, synthetic construct
  source 1..20: mol_type = other RNA
attccattaaactgttacag

SEQ ID NO: 15720 - RNA, 20 nt, synthetic construct
  source 1..20: mol_type = other RNA
attcctcaggataaaactta

SEQ ID NO: 15721 - RNA, 20 nt, synthetic construct
  source 1..20: mol_type = other RNA
attcctccctagttcacgtt

SEQ ID NO: 15722 - RNA, 20 nt, synthetic construct
  source 1..20: mol_type = other RNA
attccttcaaaaagctcaga

SEQ ID NO: 15723 - RNA, 20 nt, synthetic construct
  source 1..20: mol_type = other RNA
attcgtaaactttcttaaag

SEQ ID NO: 15724 - RNA, 20 nt, synthetic construct
  source 1..20: mol_type = other RNA
attctctgtaaagcagtagt

SEQ ID NO: 15725 - RNA, 20 nt, synthetic construct
  source 1..20: mol_type = other RNA
attctgagctttttgaagga

SEQ ID NO: 15726 - RNA, 20 nt, synthetic construct
  source 1..20: mol_type = other RNA
attctggggttgttgtcatt

SEQ ID NO: 15727 - RNA, 20 nt, synthetic construct
  source 1..20: mol_type = other RNA
attctgtaatccacagaaca

SEQ ID NO: 15728 - RNA, 20 nt, synthetic construct
  source 1..20: mol_type = other RNA
attctgtccctgaccgtctt

SEQ ID NO: 15729 - RNA, 20 nt, synthetic construct
  source 1..20: mol_type = other RNA
attctgttctcgtgaatgtg

SEQ ID NO: 15730 - RNA, 20 nt, synthetic construct
  source 1..20: mol_type = other RNA
attgaggaaagtctatccag

SEQ ID NO: 15731 - RNA, 20 nt, synthetic construct
  source 1..20: mol_type = other RNA
attgatggttttctcttttt

SEQ ID NO: 15732 - RNA, 20 nt, synthetic construct
  source 1..20: mol_type = other RNA
attgcaactgtggacagtat

SEQ ID NO: 15733 - RNA, 20 nt, synthetic construct
  source 1..20: mol_type = other RNA
attgcagttacccaaatcat

SEQ ID NO: 15734 - RNA, 20 nt, synthetic construct
  source 1..20: mol_type = other RNA
attgctgtctctgtctttag

SEQ ID NO: 15735 - RNA, 20 nt, synthetic construct
  source 1..20: mol_type = other RNA
attggaaaagtggctggtat

SEQ ID NO: 15736 - RNA, 20 nt, synthetic construct
  source 1..20: mol_type = other RNA
attggacacccctggtttac

SEQ ID NO: 15737 - RNA, 20 nt, synthetic construct
  source 1..20: mol_type = other RNA
attggaggagctctaagcat

SEQ ID NO: 15738 - RNA, 20 nt, synthetic construct
  source 1..20: mol_type = other RNA
attggatctgaggttaggca

SEQ ID NO: 15739 - RNA, 20 nt, synthetic construct
  source 1..20: mol_type = other RNA
attggttccaccacaaatta

SEQ ID NO: 15740 - RNA, 20 nt, synthetic construct
  source 1..20: mol_type = other RNA
attgtcctaaaggaagatag

SEQ ID NO: 15741 - RNA, 20 nt, synthetic construct
  source 1..20: mol_type = other RNA
attgttttctataactcaag

SEQ ID NO: 15742 - RNA, 20 nt, synthetic construct
  source 1..20: mol_type = other RNA
atttaaatcagcaatgacaa

SEQ ID NO: 15743 - RNA, 20 nt, synthetic construct
  source 1..20: mol_type = other RNA
atttaaattaccttaactat

SEQ ID NO: 15744 - RNA, 20 nt, synthetic construct
  source 1..20: mol_type = other RNA
atttaacctgatgctacact

SEQ ID NO: 15745 - RNA, 20 nt, synthetic construct
  source 1..20: mol_type = other RNA
atttaactatgtagctcctg

SEQ ID NO: 15746 - RNA, 20 nt, synthetic construct
  source 1..20: mol_type = other RNA
atttaagaacgtgaactagg

SEQ ID NO: 15747 - RNA, 20 nt, synthetic construct
  source 1..20: mol_type = other RNA
atttacatgtcgctcactcc

SEQ ID NO: 15748 - RNA, 20 nt, synthetic construct
  source 1..20: mol_type = other RNA
atttacttaaagttggctag

SEQ ID NO: 15749 - RNA, 20 nt, synthetic construct
  source 1..20: mol_type = other RNA
atttagaggaagaaaaaggg

SEQ ID NO: 15750 - RNA, 20 nt, synthetic construct
  source 1..20: mol_type = other RNA
atttagctgaaagctaagtc

SEQ ID NO: 15751 - RNA, 20 nt, synthetic construct
  source 1..20: mol_type = other RNA
atttaggctgggttcatttg

SEQ ID NO: 15752 - RNA, 20 nt, synthetic construct
  source 1..20: mol_type = other RNA
atttccttactgctcagtaa

SEQ ID NO: 15753 - RNA, 20 nt, synthetic construct
  source 1..20: mol_type = other RNA
atttctgtcctacaagtttt

SEQ ID NO: 15754 - RNA, 20 nt, synthetic construct
  source 1..20: mol_type = other RNA
atttctgttcttaccagtta

SEQ ID NO: 15755 - RNA, 20 nt, synthetic construct
  source 1..20: mol_type = other RNA
atttgaatctgcaggattaa

SEQ ID NO: 15756 - RNA, 20 nt, synthetic construct
  source 1..20: mol_type = other RNA
atttgaattgcaactgtgga

SEQ ID NO: 15757 - RNA, 20 nt, synthetic construct
  source 1..20: mol_type = other RNA
atttgagacccttgctgcac

SEQ ID NO: 15758 - RNA, 20 nt, synthetic construct
  source 1..20: mol_type = other RNA
atttggaagctatcacacag

SEQ ID NO: 15759 - RNA, 20 nt, synthetic construct
  source 1..20: mol_type = other RNA
atttgggtaactgcaattca

SEQ ID NO: 15760 - RNA, 20 nt, synthetic construct
  source 1..20: mol_type = other RNA
atttgtatcacacagaccta

SEQ ID NO: 15761 - RNA, 20 nt, synthetic construct
  source 1..20: mol_type = other RNA
atttgtggtggaaccaatct

SEQ ID NO: 15762 - RNA, 20 nt, synthetic construct
  source 1..20: mol_type = other RNA
atttgtgtgtgtagtatgtg

SEQ ID NO: 15763 - RNA, 20 nt, synthetic construct
  source 1..20: mol_type = other RNA
atttgttgtacttgctcctc

SEQ ID NO: 15764 - RNA, 20 nt, synthetic construct
  source 1..20: mol_type = other RNA
attttagcttttgcttgaga

SEQ ID NO: 15765 - RNA, 20 nt, synthetic construct
  source 1..20: mol_type = other RNA
attttagggaggtgagattc

SEQ ID NO: 15766 - RNA, 20 nt, synthetic construct
  source 1..20: mol_type = other RNA
attttatcctttttccttag

SEQ ID NO: 15767 - RNA, 20 nt, synthetic construct
  source 1..20: mol_type = other RNA
attttattaatcttgagcat

SEQ ID NO: 15768 - RNA, 20 nt, synthetic construct
  source 1..20: mol_type = other RNA
attttcatgctctatcttcc

SEQ ID NO: 15769 - RNA, 20 nt, synthetic construct
  source 1..20: mol_type = other RNA
attttcattttatccttttt

SEQ ID NO: 15770 - RNA, 20 nt, synthetic construct
  source 1..20: mol_type = other RNA
attttccacatactacacac

SEQ ID NO: 15771 - RNA, 20 nt, synthetic construct
  source 1..20: mol_type = other RNA
attttccatttgttgtactt

SEQ ID NO: 15772 - RNA, 20 nt, synthetic construct
  source 1..20: mol_type = other RNA
atttttaaagatgtgcctgc

SEQ ID NO: 15773 - RNA, 20 nt, synthetic construct
  source 1..20: mol_type = other RNA
atttttcactattttccaca

SEQ ID NO: 15774 - RNA, 20 nt, synthetic construct
  source 1..20: mol_type = other RNA
atttttctagagacagacat

SEQ ID NO: 15775 - RNA, 20 nt, synthetic construct
  source 1..20: mol_type = other RNA
atttttctattaagatttaa

SEQ ID NO: 15776 - RNA, 20 nt, synthetic construct
  source 1..20: mol_type = other RNA
atttttggagcatttttcta

SEQ ID NO: 15777 - RNA, 20 nt, synthetic construct
  source 1..20: mol_type = other RNA
caaaaagaaccaccccacaa

SEQ ID NO: 15778 - RNA, 20 nt, synthetic construct
  source 1..20: mol_type = other RNA
caaaaagctcagaatagtta

SEQ ID NO: 15779 - RNA, 20 nt, synthetic construct
  source 1..20: mol_type = other RNA
caaaaatgataagtagtgat

SEQ ID NO: 15780 - RNA, 20 nt, synthetic construct
  source 1..20: mol_type = other RNA
caaaacaagcagttaaatga

SEQ ID NO: 15781 - RNA, 20 nt, synthetic construct
  source 1..20: mol_type = other RNA
caaaagataacactaaagac

SEQ ID NO: 15782 - RNA, 20 nt, synthetic construct
  source 1..20: mol_type = other RNA
caaaccataaagacatttac

SEQ ID NO: 15783 - RNA, 20 nt, synthetic construct
  source 1..20: mol_type = other RNA
caaaccatttttaaagatgt

SEQ ID NO: 15784 - RNA, 20 nt, synthetic construct
  source 1..20: mol_type = other RNA
caaactcattaacgcttgct

SEQ ID NO: 15785 - RNA, 20 nt, synthetic construct
  source 1..20: mol_type = other RNA
caaactgcccttttaaaaaa

SEQ ID NO: 15786 - RNA, 20 nt, synthetic construct
  source 1..20: mol_type = other RNA
caaactgctcaggagtcaga

SEQ ID NO: 15787 - RNA, 20 nt, synthetic construct
  source 1..20: mol_type = other RNA
caaagatatatgacgtctct

SEQ ID NO: 15788 - RNA, 20 nt, synthetic construct
  source 1..20: mol_type = other RNA
caaagctgtcctgggtccca

SEQ ID NO: 15789 - RNA, 20 nt, synthetic construct
  source 1..20: mol_type = other RNA
caaaggggagatgacatttg

SEQ ID NO: 15790 - RNA, 20 nt, synthetic construct
  source 1..20: mol_type = other RNA
caaaggggtagagagcctgg

SEQ ID NO: 15791 - RNA, 20 nt, synthetic construct
  source 1..20: mol_type = other RNA
caaagtaagttttatcctga

SEQ ID NO: 15792 - RNA, 20 nt, synthetic construct
  source 1..20: mol_type = other RNA
caaagtgtagcatcaggtta

SEQ ID NO: 15793 - RNA, 20 nt, synthetic construct
  source 1..20: mol_type = other RNA
caaatatgacctctctcctg

SEQ ID NO: 15794 - RNA, 20 nt, synthetic construct
  source 1..20: mol_type = other RNA
caaatcatagagacgtcata

SEQ ID NO: 15795 - RNA, 20 nt, synthetic construct
  source 1..20: mol_type = other RNA
caaatgaacccagcctaaat

SEQ ID NO: 15796 - RNA, 20 nt, synthetic construct
  source 1..20: mol_type = other RNA
caaatgctttttatattgct

SEQ ID NO: 15797 - RNA, 20 nt, synthetic construct
  source 1..20: mol_type = other RNA
caaatggaaaatgggatcaa

SEQ ID NO: 15798 - RNA, 20 nt, synthetic construct
  source 1..20: mol_type = other RNA
caaatggtataaaactcagg

SEQ ID NO: 15799 - RNA, 20 nt, synthetic construct
  source 1..20: mol_type = other RNA
caaatgtcatctcccctttg

SEQ ID NO: 15800 - RNA, 20 nt, synthetic construct
  source 1..20: mol_type = other RNA
caaattaaggcttgagctgg

SEQ ID NO: 15801 - RNA, 20 nt, synthetic construct
  source 1..20: mol_type = other RNA
caaattgctgtctctgtctt

SEQ ID NO: 15802 - RNA, 20 nt, synthetic construct
  source 1..20: mol_type = other RNA
caacaaaccatttttaaaga

SEQ ID NO: 15803 - RNA, 20 nt, synthetic construct
  source 1..20: mol_type = other RNA
caacaaatggaaaatgggat

SEQ ID NO: 15804 - RNA, 20 nt, synthetic construct
  source 1..20: mol_type = other RNA
caacaaccccagaattacta

SEQ ID NO: 15805 - RNA, 20 nt, synthetic construct
  source 1..20: mol_type = other RNA
caacagaccatggaaggcat

SEQ ID NO: 15806 - RNA, 20 nt, synthetic construct
  source 1..20: mol_type = other RNA
caacagtgaaagcaagcgtt

SEQ ID NO: 15807 - RNA, 20 nt, synthetic construct
  source 1..20: mol_type = other RNA
caacatctccctttttcttc

SEQ ID NO: 15808 - RNA, 20 nt, synthetic construct
  source 1..20: mol_type = other RNA
caacattttaacaccaaatg

SEQ ID NO: 15809 - RNA, 20 nt, synthetic construct
  source 1..20: mol_type = other RNA
caaccccagaattactatga

SEQ ID NO: 15810 - RNA, 20 nt, synthetic construct
  source 1..20: mol_type = other RNA
caacgagactgcggattatc

SEQ ID NO: 15811 - RNA, 20 nt, synthetic construct
  source 1..20: mol_type = other RNA
caactctcactcatacttga

SEQ ID NO: 15812 - RNA, 20 nt, synthetic construct
  source 1..20: mol_type = other RNA
caactgtggacagtatagct

SEQ ID NO: 15813 - RNA, 20 nt, synthetic construct
  source 1..20: mol_type = other RNA
caacttgctgtaaacagtac

SEQ ID NO: 15814 - RNA, 20 nt, synthetic construct
  source 1..20: mol_type = other RNA
caactttaagtaaatggagt

SEQ ID NO: 15815 - RNA, 20 nt, synthetic construct
  source 1..20: mol_type = other RNA
caagaactgtcttgggccac

SEQ ID NO: 15816 - RNA, 20 nt, synthetic construct
  source 1..20: mol_type = other RNA
caagacactattccttcaaa

SEQ ID NO: 15817 - RNA, 20 nt, synthetic construct
  source 1..20: mol_type = other RNA
caagacagttcttgcagtgt

SEQ ID NO: 15818 - RNA, 20 nt, synthetic construct
  source 1..20: mol_type = other RNA
caagagagggagaaagctag

SEQ ID NO: 15819 - RNA, 20 nt, synthetic construct
  source 1..20: mol_type = other RNA
caagataaacatttaagaac

SEQ ID NO: 15820 - RNA, 20 nt, synthetic construct
  source 1..20: mol_type = other RNA
caagatatgatgcttagagc

SEQ ID NO: 15821 - RNA, 20 nt, synthetic construct
  source 1..20: mol_type = other RNA
caagatcaagagagggagaa

SEQ ID NO: 15822 - RNA, 20 nt, synthetic construct
  source 1..20: mol_type = other RNA
caagatcacctggactgtga

SEQ ID NO: 15823 - RNA, 20 nt, synthetic construct
  source 1..20: mol_type = other RNA
caagatgtaagatggatcaa

SEQ ID NO: 15824 - RNA, 20 nt, synthetic construct
  source 1..20: mol_type = other RNA
caagcagttaaatgaaatgt

SEQ ID NO: 15825 - RNA, 20 nt, synthetic construct
  source 1..20: mol_type = other RNA
caagccagtaatggagtttc

SEQ ID NO: 15826 - RNA, 20 nt, synthetic construct
  source 1..20: mol_type = other RNA
caagccccagctcaagcctt

SEQ ID NO: 15827 - RNA, 20 nt, synthetic construct
  source 1..20: mol_type = other RNA
caagccttaatttgtggtgg

SEQ ID NO: 15828 - RNA, 20 nt, synthetic construct
  source 1..20: mol_type = other RNA
caagcgttaatgagtttgga

SEQ ID NO: 15829 - RNA, 20 nt, synthetic construct
  source 1..20: mol_type = other RNA
caaggcaggcacatctttaa

SEQ ID NO: 15830 - RNA, 20 nt, synthetic construct
  source 1..20: mol_type = other RNA
caagggtagcattccaaaaa

SEQ ID NO: 15831 - RNA, 20 nt, synthetic construct
  source 1..20: mol_type = other RNA
caagggtctcaaatggtata

SEQ ID NO: 15832 - RNA, 20 nt, synthetic construct
  source 1..20: mol_type = other RNA
caagtacaacaaatggaaaa

SEQ ID NO: 15833 - RNA, 20 nt, synthetic construct
  source 1..20: mol_type = other RNA
caagtatgagtgagagttgc

SEQ ID NO: 15834 - RNA, 20 nt, synthetic construct
  source 1..20: mol_type = other RNA
caagtccggggctacagcta

SEQ ID NO: 15835 - RNA, 20 nt, synthetic construct
  source 1..20: mol_type = other RNA
caagtgtttccaggaagtga

SEQ ID NO: 15836 - RNA, 20 nt, synthetic construct
  source 1..20: mol_type = other RNA
caagttctgatatatttaac

SEQ ID NO: 15837 - RNA, 20 nt, synthetic construct
  source 1..20: mol_type = other RNA
caagttgtctaacccgcggg

SEQ ID NO: 15838 - RNA, 20 nt, synthetic construct
  source 1..20: mol_type = other RNA
caagttttcacttcctggaa

SEQ ID NO: 15839 - RNA, 20 nt, synthetic construct
  source 1..20: mol_type = other RNA
caatcaagtgtttccaggaa

SEQ ID NO: 15840 - RNA, 20 nt, synthetic construct
  source 1..20: mol_type = other RNA
caatcacaaagtaagtttta

SEQ ID NO: 15841 - RNA, 20 nt, synthetic construct
  source 1..20: mol_type = other RNA
caatcatcctaacaagatgt

SEQ ID NO: 15842 - RNA, 20 nt, synthetic construct
  source 1..20: mol_type = other RNA
caatctgtctggtttcgcga

SEQ ID NO: 15843 - RNA, 20 nt, synthetic construct
  source 1..20: mol_type = other RNA
caatgacaacaaccccagaa

SEQ ID NO: 15844 - RNA, 20 nt, synthetic construct
  source 1..20: mol_type = other RNA
caatgctcaagattaataaa

SEQ ID NO: 15845 - RNA, 20 nt, synthetic construct
  source 1..20: mol_type = other RNA
caatgtccacgtattctgta

SEQ ID NO: 15846 - RNA, 20 nt, synthetic construct
  source 1..20: mol_type = other RNA
caattcattccatgtgactt

SEQ ID NO: 15847 - RNA, 20 nt, synthetic construct
  source 1..20: mol_type = other RNA
caattctctgtaaagcagta

SEQ ID NO: 15848 - RNA, 20 nt, synthetic construct
  source 1..20: mol_type = other RNA
caatttaacagctttttcat

SEQ ID NO: 15849 - RNA, 20 nt, synthetic construct
  source 1..20: mol_type = other RNA
caatttggaagctatcacac

SEQ ID NO: 15850 - RNA, 20 nt, synthetic construct
  source 1..20: mol_type = other RNA
cacaaagatatatgacgtct

SEQ ID NO: 15851 - RNA, 20 nt, synthetic construct
  source 1..20: mol_type = other RNA
cacaaagtaagttttatcct

SEQ ID NO: 15852 - RNA, 20 nt, synthetic construct
  source 1..20: mol_type = other RNA
cacaaatatgacctctctcc

SEQ ID NO: 15853 - RNA, 20 nt, synthetic construct
  source 1..20: mol_type = other RNA
cacaaattaaggcttgagct

SEQ ID NO: 15854 - RNA, 20 nt, synthetic construct
  source 1..20: mol_type = other RNA
cacaaattcgtaaactttct

SEQ ID NO: 15855 - RNA, 20 nt, synthetic construct
  source 1..20: mol_type = other RNA
cacacaaatatgacctctct

SEQ ID NO: 15856 - RNA, 20 nt, synthetic construct
  source 1..20: mol_type = other RNA
cacacacaaatatgacctct

SEQ ID NO: 15857 - RNA, 20 nt, synthetic construct
  source 1..20: mol_type = other RNA
cacacagacctattcttcat

SEQ ID NO: 15858 - RNA, 20 nt, synthetic construct
  source 1..20: mol_type = other RNA
cacacaggcatctgagatca

SEQ ID NO: 15859 - RNA, 20 nt, synthetic construct
  source 1..20: mol_type = other RNA
cacactgcaagaactgtctt

SEQ ID NO: 15860 - RNA, 20 nt, synthetic construct
  source 1..20: mol_type = other RNA
cacagaacaagtccggggct

SEQ ID NO: 15861 - RNA, 20 nt, synthetic construct
  source 1..20: mol_type = other RNA
cacagacctattcttcattc

SEQ ID NO: 15862 - RNA, 20 nt, synthetic construct
  source 1..20: mol_type = other RNA
cacaggcatctgagatcagt

SEQ ID NO: 15863 - RNA, 20 nt, synthetic construct
  source 1..20: mol_type = other RNA
cacagtccaggtgatcttga

SEQ ID NO: 15864 - RNA, 20 nt, synthetic construct
  source 1..20: mol_type = other RNA
cacagttgcaattcaaatta

SEQ ID NO: 15865 - RNA, 20 nt, synthetic construct
  source 1..20: mol_type = other RNA
cacatactacacacacaaat

SEQ ID NO: 15866 - RNA, 20 nt, synthetic construct
  source 1..20: mol_type = other RNA
cacatataaaggacagctga

SEQ ID NO: 15867 - RNA, 20 nt, synthetic construct
  source 1..20: mol_type = other RNA
cacatctttaaaaatggttt

SEQ ID NO: 15868 - RNA, 20 nt, synthetic construct
  source 1..20: mol_type = other RNA
cacatggaatgaattgcagt

SEQ ID NO: 15869 - RNA, 20 nt, synthetic construct
  source 1..20: mol_type = other RNA
cacattcacgagaacagaat

SEQ ID NO: 15870 - RNA, 20 nt, synthetic construct
  source 1..20: mol_type = other RNA
caccaaagtgtagcatcagg

SEQ ID NO: 15871 - RNA, 20 nt, synthetic construct
  source 1..20: mol_type = other RNA
caccaaatgctttttatatt

SEQ ID NO: 15872 - RNA, 20 nt, synthetic construct
  source 1..20: mol_type = other RNA
caccacaaattaaggcttga

SEQ ID NO: 15873 - RNA, 20 nt, synthetic construct
  source 1..20: mol_type = other RNA
caccaccaaagtgtagcatc

SEQ ID NO: 15874 - RNA, 20 nt, synthetic construct
  source 1..20: mol_type = other RNA
caccaggctacccaagatca

SEQ ID NO: 15875 - RNA, 20 nt, synthetic construct
  source 1..20: mol_type = other RNA
caccccacaaagatatatga

SEQ ID NO: 15876 - RNA, 20 nt, synthetic construct
  source 1..20: mol_type = other RNA
cacccctggtttacaggatg

SEQ ID NO: 15877 - RNA, 20 nt, synthetic construct
  source 1..20: mol_type = other RNA
caccctctctccccaggctc

SEQ ID NO: 15878 - RNA, 20 nt, synthetic construct
  source 1..20: mol_type = other RNA
cacctccctaaaattcatta

SEQ ID NO: 15879 - RNA, 20 nt, synthetic construct
  source 1..20: mol_type = other RNA
cacctgagttttataccatt

SEQ ID NO: 15880 - RNA, 20 nt, synthetic construct
  source 1..20: mol_type = other RNA
cacctggactgtgaagacgg

SEQ ID NO: 15881 - RNA, 20 nt, synthetic construct
  source 1..20: mol_type = other RNA
cacctgtcattttcatgctc

SEQ ID NO: 15882 - RNA, 20 nt, synthetic construct
  source 1..20: mol_type = other RNA
cacgagaacagaattcatcc

SEQ ID NO: 15883 - RNA, 20 nt, synthetic construct
  source 1..20: mol_type = other RNA
cacgcagtacaaactgctca

SEQ ID NO: 15884 - RNA, 20 nt, synthetic construct
  source 1..20: mol_type = other RNA
cacgtattctgtaatccaca

SEQ ID NO: 15885 - RNA, 20 nt, synthetic construct
  source 1..20: mol_type = other RNA
cacgttcttaaatgtttatc

SEQ ID NO: 15886 - RNA, 20 nt, synthetic construct
  source 1..20: mol_type = other RNA
cactaaagacagagacagca

SEQ ID NO: 15887 - RNA, 20 nt, synthetic construct
  source 1..20: mol_type = other RNA
cactacttatcatttttgga

SEQ ID NO: 15888 - RNA, 20 nt, synthetic construct
  source 1..20: mol_type = other RNA
cactagctttctccctctct

SEQ ID NO: 15889 - RNA, 20 nt, synthetic construct
  source 1..20: mol_type = other RNA
cactattccttcaaaaagct

SEQ ID NO: 15890 - RNA, 20 nt, synthetic construct
  source 1..20: mol_type = other RNA
cactattttccacatactac

SEQ ID NO: 15891 - RNA, 20 nt, synthetic construct
  source 1..20: mol_type = other RNA
cactcatacttgatcccatt

SEQ ID NO: 15892 - RNA, 20 nt, synthetic construct
  source 1..20: mol_type = other RNA
cactccatttacttaaagtt

SEQ ID NO: 15893 - RNA, 20 nt, synthetic construct
  source 1..20: mol_type = other RNA
cactgcaagaactgtcttgg

SEQ ID NO: 15894 - RNA, 20 nt, synthetic construct
  source 1..20: mol_type = other RNA
cactgctgggtaagagtcaa

SEQ ID NO: 15895 - RNA, 20 nt, synthetic construct
  source 1..20: mol_type = other RNA
cactggtttctcaagcaaaa

SEQ ID NO: 15896 - RNA, 20 nt, synthetic construct
  source 1..20: mol_type = other RNA
cactgttgtccaaggcaggc

SEQ ID NO: 15897 - RNA, 20 nt, synthetic construct
  source 1..20: mol_type = other RNA
cacttcctggaaacacttga

SEQ ID NO: 15898 - RNA, 20 nt, synthetic construct
  source 1..20: mol_type = other RNA
cacttgattggaggagctct

SEQ ID NO: 15899 - RNA, 20 nt, synthetic construct
  source 1..20: mol_type = other RNA
cactttggtggtgcagcaag

SEQ ID NO: 15900 - RNA, 20 nt, synthetic construct
  source 1..20: mol_type = other RNA
cacttttccaatgctcaaga

SEQ ID NO: 15901 - RNA, 20 nt, synthetic construct
  source 1..20: mol_type = other RNA
cagaaatgagaggtatttag

SEQ ID NO: 15902 - RNA, 20 nt, synthetic construct
  source 1..20: mol_type = other RNA
cagaaatttaggctgggttc

SEQ ID NO: 15903 - RNA, 20 nt, synthetic construct
  source 1..20: mol_type = other RNA
cagaacaagtccggggctac

SEQ ID NO: 15904 - RNA, 20 nt, synthetic construct
  source 1..20: mol_type = other RNA
cagaacttgaatgaagaata

SEQ ID NO: 15905 - RNA, 20 nt, synthetic construct
  source 1..20: mol_type = other RNA
cagaagaaaactgctttttt

SEQ ID NO: 15906 - RNA, 20 nt, synthetic construct
  source 1..20: mol_type = other RNA
cagaatacgtggacattgat

SEQ ID NO: 15907 - RNA, 20 nt, synthetic construct
  source 1..20: mol_type = other RNA
cagaatagttaaggtaattt

SEQ ID NO: 15908 - RNA, 20 nt, synthetic construct
  source 1..20: mol_type = other RNA
cagaatcccagctaaggaaa

SEQ ID NO: 15909 - RNA, 20 nt, synthetic construct
  source 1..20: mol_type = other RNA
cagaattactatgacccacg

SEQ ID NO: 15910 - RNA, 20 nt, synthetic construct
  source 1..20: mol_type = other RNA
cagaattcatcctgtaaacc

SEQ ID NO: 15911 - RNA, 20 nt, synthetic construct
  source 1..20: mol_type = other RNA
cagacagattggttccacca

SEQ ID NO: 15912 - RNA, 20 nt, synthetic construct
  source 1..20: mol_type = other RNA
cagacataaagcatgatcac

SEQ ID NO: 15913 - RNA, 20 nt, synthetic construct
  source 1..20: mol_type = other RNA
cagacatagcactagctttc

SEQ ID NO: 15914 - RNA, 20 nt, synthetic construct
  source 1..20: mol_type = other RNA
cagaccatggaaggcatgac

SEQ ID NO: 15915 - RNA, 20 nt, synthetic construct
  source 1..20: mol_type = other RNA
cagacctattcttcattcaa

SEQ ID NO: 15916 - RNA, 20 nt, synthetic construct
  source 1..20: mol_type = other RNA
cagagaattggatctgaggt

SEQ ID NO: 15917 - RNA, 20 nt, synthetic construct
  source 1..20: mol_type = other RNA
cagagacagcaatttggaag

SEQ ID NO: 15918 - RNA, 20 nt, synthetic construct
  source 1..20: mol_type = other RNA
cagagagcttcagcttttat

SEQ ID NO: 15919 - RNA, 20 nt, synthetic construct
  source 1..20: mol_type = other RNA
cagagtatactaggagctca

SEQ ID NO: 15920 - RNA, 20 nt, synthetic construct
  source 1..20: mol_type = other RNA
cagatccaattctctgtaaa

SEQ ID NO: 15921 - RNA, 20 nt, synthetic construct
  source 1..20: mol_type = other RNA
cagatgcctgtgtgatagct

SEQ ID NO: 15922 - RNA, 20 nt, synthetic construct
  source 1..20: mol_type = other RNA
cagattcaaatgtcatctcc

SEQ ID NO: 15923 - RNA, 20 nt, synthetic construct
  source 1..20: mol_type = other RNA
cagattggttccaccacaaa

SEQ ID NO: 15924 - RNA, 20 nt, synthetic construct
  source 1..20: mol_type = other RNA
cagcaagggtagcattccaa

SEQ ID NO: 15925 - RNA, 20 nt, synthetic construct
  source 1..20: mol_type = other RNA
cagcaagggtctcaaatggt

SEQ ID NO: 15926 - RNA, 20 nt, synthetic construct
  source 1..20: mol_type = other RNA
cagcaagttgtctaacccgc

SEQ ID NO: 15927 - RNA, 20 nt, synthetic construct
  source 1..20: mol_type = other RNA
cagcaatgacaacaacccca

SEQ ID NO: 15928 - RNA, 20 nt, synthetic construct
  source 1..20: mol_type = other RNA
cagcaatttggaagctatca

SEQ ID NO: 15929 - RNA, 20 nt, synthetic construct
  source 1..20: mol_type = other RNA
cagcagtgcttttattcctc

SEQ ID NO: 15930 - RNA, 20 nt, synthetic construct
  source 1..20: mol_type = other RNA
cagccacttttccaatgctc

SEQ ID NO: 15931 - RNA, 20 nt, synthetic construct
  source 1..20: mol_type = other RNA
cagcctaaatttctgtccta

SEQ ID NO: 15932 - RNA, 20 nt, synthetic construct
  source 1..20: mol_type = other RNA
cagctaaggaaaaaggataa

SEQ ID NO: 15933 - RNA, 20 nt, synthetic construct
  source 1..20: mol_type = other RNA
cagctatactgtccacagtt

SEQ ID NO: 15934 - RNA, 20 nt, synthetic construct
  source 1..20: mol_type = other RNA
cagctcaagccttaatttgt

SEQ ID NO: 15935 - RNA, 20 nt, synthetic construct
  source 1..20: mol_type = other RNA
cagctgtcctttatatgtgg

SEQ ID NO: 15936 - RNA, 20 nt, synthetic construct
  source 1..20: mol_type = other RNA
cagcttttatttccttactg

SEQ ID NO: 15937 - RNA, 20 nt, synthetic construct
  source 1..20: mol_type = other RNA
cagctttttcatttttcact

SEQ ID NO: 15938 - RNA, 20 nt, synthetic construct
  source 1..20: mol_type = other RNA
caggaagtgaaaacttgtag

SEQ ID NO: 15939 - RNA, 20 nt, synthetic construct
  source 1..20: mol_type = other RNA
caggagagaggtcatatttg

SEQ ID NO: 15940 - RNA, 20 nt, synthetic construct
  source 1..20: mol_type = other RNA
caggagctacatagttaaat

SEQ ID NO: 15941 - RNA, 20 nt, synthetic construct
  source 1..20: mol_type = other RNA
caggagtacaagacactatt

SEQ ID NO: 15942 - RNA, 20 nt, synthetic construct
  source 1..20: mol_type = other RNA
caggagtcagaagaaaactg

SEQ ID NO: 15943 - RNA, 20 nt, synthetic construct
  source 1..20: mol_type = other RNA
caggataaaacttactttgt

SEQ ID NO: 15944 - RNA, 20 nt, synthetic construct
  source 1..20: mol_type = other RNA
caggatgaattctgttctcg

SEQ ID NO: 15945 - RNA, 20 nt, synthetic construct
  source 1..20: mol_type = other RNA
caggattaaaagcagcaagg

SEQ ID NO: 15946 - RNA, 20 nt, synthetic construct
  source 1..20: mol_type = other RNA
caggcacatctttaaaaatg

SEQ ID NO: 15947 - RNA, 20 nt, synthetic construct
  source 1..20: mol_type = other RNA
caggcatctgagatcagtta

SEQ ID NO: 15948 - RNA, 20 nt, synthetic construct
  source 1..20: mol_type = other RNA
caggcatcttagcaactctc

SEQ ID NO: 15949 - RNA, 20 nt, synthetic construct
  source 1..20: mol_type = other RNA
caggctacccaagatcaaga

SEQ ID NO: 15950 - RNA, 20 nt, synthetic construct
  source 1..20: mol_type = other RNA
caggctctctacccctttgc

SEQ ID NO: 15951 - RNA, 20 nt, synthetic construct
  source 1..20: mol_type = other RNA
cagggacagaatcccagcta

SEQ ID NO: 15952 - RNA, 20 nt, synthetic construct
  source 1..20: mol_type = other RNA
cagggaccttatgcatcaca

SEQ ID NO: 15953 - RNA, 20 nt, synthetic construct
  source 1..20: mol_type = other RNA
caggtgaaactccattactg

SEQ ID NO: 15954 - RNA, 20 nt, synthetic construct
  source 1..20: mol_type = other RNA
caggtgatcatgctttatgt

SEQ ID NO: 15955 - RNA, 20 nt, synthetic construct
  source 1..20: mol_type = other RNA
caggtgatcttgactactgc

SEQ ID NO: 15956 - RNA, 20 nt, synthetic construct
  source 1..20: mol_type = other RNA
cagtaaaaagagaaaaccat

SEQ ID NO: 15957 - RNA, 20 nt, synthetic construct
  source 1..20: mol_type = other RNA
cagtaaggaaataaaagctg

SEQ ID NO: 15958 - RNA, 20 nt, synthetic construct
  source 1..20: mol_type = other RNA
cagtaatggagtttcacctg

SEQ ID NO: 15959 - RNA, 20 nt, synthetic construct
  source 1..20: mol_type = other RNA
cagtacaaactgctcaggag

SEQ ID NO: 15960 - RNA, 20 nt, synthetic construct
  source 1..20: mol_type = other RNA
cagtacaagccagtaatgga

SEQ ID NO: 15961 - RNA, 20 nt, synthetic construct
  source 1..20: mol_type = other RNA
cagtagtcaagatcacctgg

SEQ ID NO: 15962 - RNA, 20 nt, synthetic construct
  source 1..20: mol_type = other RNA
cagtatagctgtagccccgg

SEQ ID NO: 15963 - RNA, 20 nt, synthetic construct
  source 1..20: mol_type = other RNA
cagtccaggtgatcttgact

SEQ ID NO: 15964 - RNA, 20 nt, synthetic construct
  source 1..20: mol_type = other RNA
cagtgaaagcaagcgttaat

SEQ ID NO: 15965 - RNA, 20 nt, synthetic construct
  source 1..20: mol_type = other RNA
cagtgcttccctccctcacc

SEQ ID NO: 15966 - RNA, 20 nt, synthetic construct
  source 1..20: mol_type = other RNA
cagtgcttttattcctccct

SEQ ID NO: 15967 - RNA, 20 nt, synthetic construct
  source 1..20: mol_type = other RNA
cagttaaatgaaatgtaatg

SEQ ID NO: 15968 - RNA, 20 nt, synthetic construct
  source 1..20: mol_type = other RNA
cagttacccaaatcatagag

SEQ ID NO: 15969 - RNA, 20 nt, synthetic construct
  source 1..20: mol_type = other RNA
cagttactaactggtaagaa

SEQ ID NO: 15970 - RNA, 20 nt, synthetic construct
  source 1..20: mol_type = other RNA
cagttagtaactgatctcag

SEQ ID NO: 15971 - RNA, 20 nt, synthetic construct
  source 1..20: mol_type = other RNA
cagttcttgcagtgtggccc

SEQ ID NO: 15972 - RNA, 20 nt, synthetic construct
  source 1..20: mol_type = other RNA
cagttctttagtcataccag

SEQ ID NO: 15973 - RNA, 20 nt, synthetic construct
  source 1..20: mol_type = other RNA
cagtttaatggaatctcacc

SEQ ID NO: 15974 - RNA, 20 nt, synthetic construct
  source 1..20: mol_type = other RNA
cagtttgggtcatagaacaa

SEQ ID NO: 15975 - RNA, 20 nt, synthetic construct
  source 1..20: mol_type = other RNA
cagtttgtactgcgtgggtc

SEQ ID NO: 15976 - RNA, 20 nt, synthetic construct
  source 1..20: mol_type = other RNA
cagttttcttctgactcctg

SEQ ID NO: 15977 - RNA, 20 nt, synthetic construct
  source 1..20: mol_type = other RNA
cataaagacatttacatgtc

SEQ ID NO: 15978 - RNA, 20 nt, synthetic construct
  source 1..20: mol_type = other RNA
cataaagcatgatcacctga

SEQ ID NO: 15979 - RNA, 20 nt, synthetic construct
  source 1..20: mol_type = other RNA
cataaggtccctggatagac

SEQ ID NO: 15980 - RNA, 20 nt, synthetic construct
  source 1..20: mol_type = other RNA
cataatgaattttagggagg

SEQ ID NO: 15981 - RNA, 20 nt, synthetic construct
  source 1..20: mol_type = other RNA
cataccagccacttttccaa

SEQ ID NO: 15982 - RNA, 20 nt, synthetic construct
  source 1..20: mol_type = other RNA
catactacacacacaaatat

SEQ ID NO: 15983 - RNA, 20 nt, synthetic construct
  source 1..20: mol_type = other RNA
catacttgatcccattttcc

SEQ ID NO: 15984 - RNA, 20 nt, synthetic construct
  source 1..20: mol_type = other RNA
catagaacaacagaccatgg

SEQ ID NO: 15985 - RNA, 20 nt, synthetic construct
  source 1..20: mol_type = other RNA
catagagacgtcatatatct

SEQ ID NO: 15986 - RNA, 20 nt, synthetic construct
  source 1..20: mol_type = other RNA
catagcactagctttctccc

SEQ ID NO: 15987 - RNA, 20 nt, synthetic construct
  source 1..20: mol_type = other RNA
catagtaattctggggttgt

SEQ ID NO: 15988 - RNA, 20 nt, synthetic construct
  source 1..20: mol_type = other RNA
catagttaaatatatcagaa

SEQ ID NO: 15989 - RNA, 20 nt, synthetic construct
  source 1..20: mol_type = other RNA
catataaaggacagctgatg

SEQ ID NO: 15990 - RNA, 20 nt, synthetic construct
  source 1..20: mol_type = other RNA
catatatctttgtggggtgg

SEQ ID NO: 15991 - RNA, 20 nt, synthetic construct
  source 1..20: mol_type = other RNA
catatcttgagttatagaaa

SEQ ID NO: 15992 - RNA, 20 nt, synthetic construct
  source 1..20: mol_type = other RNA
catatttgtgtgtgtagtat

SEQ ID NO: 15993 - RNA, 20 nt, synthetic construct
  source 1..20: mol_type = other RNA
catcaatgtccacgtattct

SEQ ID NO: 15994 - RNA, 20 nt, synthetic construct
  source 1..20: mol_type = other RNA
catcacattcacgagaacag

SEQ ID NO: 15995 - RNA, 20 nt, synthetic construct
  source 1..20: mol_type = other RNA
catcagagtatactaggagc

SEQ ID NO: 15996 - RNA, 20 nt, synthetic construct
  source 1..20: mol_type = other RNA
catcagctgtcctttatatg

SEQ ID NO: 15997 - RNA, 20 nt, synthetic construct
  source 1..20: mol_type = other RNA
catcatatcttgagttatag

SEQ ID NO: 15998 - RNA, 20 nt, synthetic construct
  source 1..20: mol_type = other RNA
catccctaccaggcatctta

SEQ ID NO: 15999 - RNA, 20 nt, synthetic construct
  source 1..20: mol_type = other RNA
catcctaacaagatgtaaga

SEQ ID NO: 16000 - RNA, 20 nt, synthetic construct
  source 1..20: mol_type = other RNA
catcctgtaaaccaggggtg

SEQ ID NO: 16001 - RNA, 20 nt, synthetic construct
  source 1..20: mol_type = other RNA
catctcccctttggtcatgc

SEQ ID NO: 16002 - RNA, 20 nt, synthetic construct
  source 1..20: mol_type = other RNA
catctccctttttcttcctc

SEQ ID NO: 16003 - RNA, 20 nt, synthetic construct
  source 1..20: mol_type = other RNA
catctgagatcagttactaa

SEQ ID NO: 16004 - RNA, 20 nt, synthetic construct
  source 1..20: mol_type = other RNA
catcttacatcttgttagga

SEQ ID NO: 16005 - RNA, 20 nt, synthetic construct
  source 1..20: mol_type = other RNA
catcttagcaactctcactc

SEQ ID NO: 16006 - RNA, 20 nt, synthetic construct
  source 1..20: mol_type = other RNA
catcttgttaggatgattgt

SEQ ID NO: 16007 - RNA, 20 nt, synthetic construct
  source 1..20: mol_type = other RNA
catctttaaaaatggtttgt

SEQ ID NO: 16008 - RNA, 20 nt, synthetic construct
  source 1..20: mol_type = other RNA
catgaaaatgacaggtgaaa

SEQ ID NO: 16009 - RNA, 20 nt, synthetic construct
  source 1..20: mol_type = other RNA
catgaccaaaggggagatga

SEQ ID NO: 16010 - RNA, 20 nt, synthetic construct
  source 1..20: mol_type = other RNA
catgatcacctgagttttat

SEQ ID NO: 16011 - RNA, 20 nt, synthetic construct
  source 1..20: mol_type = other RNA
catgccttccatggtctgtt

SEQ ID NO: 16012 - RNA, 20 nt, synthetic construct
  source 1..20: mol_type = other RNA
catgcggcccgcgggttaga

SEQ ID NO: 16013 - RNA, 20 nt, synthetic construct
  source 1..20: mol_type = other RNA
catgctctatcttcctttag

SEQ ID NO: 16014 - RNA, 20 nt, synthetic construct
  source 1..20: mol_type = other RNA
catgctttatgtctgtctct

SEQ ID NO: 16015 - RNA, 20 nt, synthetic construct
  source 1..20: mol_type = other RNA
catggaaggcatgaccaaag

SEQ ID NO: 16016 - RNA, 20 nt, synthetic construct
  source 1..20: mol_type = other RNA
catggaatgaattgcagtta

SEQ ID NO: 16017 - RNA, 20 nt, synthetic construct
  source 1..20: mol_type = other RNA
catgggacccaggacagctt

SEQ ID NO: 16018 - RNA, 20 nt, synthetic construct
  source 1..20: mol_type = other RNA
catggtctgttgttctatga

SEQ ID NO: 16019 - RNA, 20 nt, synthetic construct
  source 1..20: mol_type = other RNA
catgtaaatgtctttatggt

SEQ ID NO: 16020 - RNA, 20 nt, synthetic construct
  source 1..20: mol_type = other RNA
catgtcgctcactccattta

SEQ ID NO: 16021 - RNA, 20 nt, synthetic construct
  source 1..20: mol_type = other RNA
catgtgacttcaggagagag

SEQ ID NO: 16022 - RNA, 20 nt, synthetic construct
  source 1..20: mol_type = other RNA
cattaaactgttacaggagc

SEQ ID NO: 16023 - RNA, 20 nt, synthetic construct
  source 1..20: mol_type = other RNA
cattaacgcttgctttcact

SEQ ID NO: 16024 - RNA, 20 nt, synthetic construct
  source 1..20: mol_type = other RNA
cattacatttcatttaactg

SEQ ID NO: 16025 - RNA, 20 nt, synthetic construct
  source 1..20: mol_type = other RNA
cattactggcttgtactgtt

SEQ ID NO: 16026 - RNA, 20 nt, synthetic construct
  source 1..20: mol_type = other RNA
cattcaaagctgtcctgggt

SEQ ID NO: 16027 - RNA, 20 nt, synthetic construct
  source 1..20: mol_type = other RNA
cattcaagttctgatatatt

SEQ ID NO: 16028 - RNA, 20 nt, synthetic construct
  source 1..20: mol_type = other RNA
cattcacgagaacagaattc

SEQ ID NO: 16029 - RNA, 20 nt, synthetic construct
  source 1..20: mol_type = other RNA
cattccaaaaagaaccaccc

SEQ ID NO: 16030 - RNA, 20 nt, synthetic construct
  source 1..20: mol_type = other RNA
cattccatgtgacttcagga

SEQ ID NO: 16031 - RNA, 20 nt, synthetic construct
  source 1..20: mol_type = other RNA
cattgatggttttctctttt

SEQ ID NO: 16032 - RNA, 20 nt, synthetic construct
  source 1..20: mol_type = other RNA
cattgctgatttaaattacc

SEQ ID NO: 16033 - RNA, 20 nt, synthetic construct
  source 1..20: mol_type = other RNA
cattggaaaagtggctggta

SEQ ID NO: 16034 - RNA, 20 nt, synthetic construct
  source 1..20: mol_type = other RNA
catttaagaacgtgaactag

SEQ ID NO: 16035 - RNA, 20 nt, synthetic construct
  source 1..20: mol_type = other RNA
catttacatgtcgctcactc

SEQ ID NO: 16036 - RNA, 20 nt, synthetic construct
  source 1..20: mol_type = other RNA
catttacttaaagttggcta

SEQ ID NO: 16037 - RNA, 20 nt, synthetic construct
  source 1..20: mol_type = other RNA
catttcatttaactgcttgt

SEQ ID NO: 16038 - RNA, 20 nt, synthetic construct
  source 1..20: mol_type = other RNA
catttctgttcttaccagtt

SEQ ID NO: 16039 - RNA, 20 nt, synthetic construct
  source 1..20: mol_type = other RNA
catttgaatctgcaggatta

SEQ ID NO: 16040 - RNA, 20 nt, synthetic construct
  source 1..20: mol_type = other RNA
catttgagacccttgctgca

SEQ ID NO: 16041 - RNA, 20 nt, synthetic construct
  source 1..20: mol_type = other RNA
catttggtgttaaaatgttg

SEQ ID NO: 16042 - RNA, 20 nt, synthetic construct
  source 1..20: mol_type = other RNA
catttgtatcacacagacct

SEQ ID NO: 16043 - RNA, 20 nt, synthetic construct
  source 1..20: mol_type = other RNA
catttgttgtacttgctcct

SEQ ID NO: 16044 - RNA, 20 nt, synthetic construct
  source 1..20: mol_type = other RNA
cattttatcctttttcctta

SEQ ID NO: 16045 - RNA, 20 nt, synthetic construct
  source 1..20: mol_type = other RNA
cattttattaatcttgagca

SEQ ID NO: 16046 - RNA, 20 nt, synthetic construct
  source 1..20: mol_type = other RNA
cattttcatgctctatcttc

SEQ ID NO: 16047 - RNA, 20 nt, synthetic construct
  source 1..20: mol_type = other RNA
cattttccatttgttgtact

SEQ ID NO: 16048 - RNA, 20 nt, synthetic construct
  source 1..20: mol_type = other RNA
catttttaaagatgtgcctg

SEQ ID NO: 16049 - RNA, 20 nt, synthetic construct
  source 1..20: mol_type = other RNA
catttttcactattttccac

SEQ ID NO: 16050 - RNA, 20 nt, synthetic construct
  source 1..20: mol_type = other RNA
catttttctagagacagaca

SEQ ID NO: 16051 - RNA, 20 nt, synthetic construct
  source 1..20: mol_type = other RNA
catttttggagcatttttct

SEQ ID NO: 16052 - RNA, 20 nt, synthetic construct
  source 1..20: mol_type = other RNA
ccaaaaagaaccaccccaca

SEQ ID NO: 16053 - RNA, 20 nt, synthetic construct
  source 1..20: mol_type = other RNA
ccaaaaatgataagtagtga

SEQ ID NO: 16054 - RNA, 20 nt, synthetic construct
  source 1..20: mol_type = other RNA
ccaaactcattaacgcttgc

SEQ ID NO: 16055 - RNA, 20 nt, synthetic construct
  source 1..20: mol_type = other RNA
ccaaactgcccttttaaaaa

SEQ ID NO: 16056 - RNA, 20 nt, synthetic construct
  source 1..20: mol_type = other RNA
ccaaaggggagatgacattt

SEQ ID NO: 16057 - RNA, 20 nt, synthetic construct
  source 1..20: mol_type = other RNA
ccaaagtgtagcatcaggtt

SEQ ID NO: 16058 - RNA, 20 nt, synthetic construct
  source 1..20: mol_type = other RNA
ccaaatcatagagacgtcat

SEQ ID NO: 16059 - RNA, 20 nt, synthetic construct
  source 1..20: mol_type = other RNA
ccaaatgctttttatattgc

SEQ ID NO: 16060 - RNA, 20 nt, synthetic construct
  source 1..20: mol_type = other RNA
ccaaattgctgtctctgtct

SEQ ID NO: 16061 - RNA, 20 nt, synthetic construct
  source 1..20: mol_type = other RNA
ccaacaaaccatttttaaag

SEQ ID NO: 16062 - RNA, 20 nt, synthetic construct
  source 1..20: mol_type = other RNA
ccaacattttaacaccaaat

SEQ ID NO: 16063 - RNA, 20 nt, synthetic construct
  source 1..20: mol_type = other RNA
ccaactttaagtaaatggag

SEQ ID NO: 16064 - RNA, 20 nt, synthetic construct
  source 1..20: mol_type = other RNA
ccaagacagttcttgcagtg

SEQ ID NO: 16065 - RNA, 20 nt, synthetic construct
  source 1..20: mol_type = other RNA
ccaagatcaagagagggaga

SEQ ID NO: 16066 - RNA, 20 nt, synthetic construct
  source 1..20: mol_type = other RNA
ccaaggcaggcacatcttta

SEQ ID NO: 16067 - RNA, 20 nt, synthetic construct
  source 1..20: mol_type = other RNA
ccaatcaagtgtttccagga

SEQ ID NO: 16068 - RNA, 20 nt, synthetic construct
  source 1..20: mol_type = other RNA
ccaatctgtctggtttcgcg

SEQ ID NO: 16069 - RNA, 20 nt, synthetic construct
  source 1..20: mol_type = other RNA
ccaatgctcaagattaataa

SEQ ID NO: 16070 - RNA, 20 nt, synthetic construct
  source 1..20: mol_type = other RNA
ccaattctctgtaaagcagt

SEQ ID NO: 16071 - RNA, 20 nt, synthetic construct
  source 1..20: mol_type = other RNA
ccacaaagatatatgacgtc

SEQ ID NO: 16072 - RNA, 20 nt, synthetic construct
  source 1..20: mol_type = other RNA
ccacaaattaaggcttgagc

SEQ ID NO: 16073 - RNA, 20 nt, synthetic construct
  source 1..20: mol_type = other RNA
ccacactgcaagaactgtct

SEQ ID NO: 16074 - RNA, 20 nt, synthetic construct
  source 1..20: mol_type = other RNA
ccacagaacaagtccggggc

SEQ ID NO: 16075 - RNA, 20 nt, synthetic construct
  source 1..20: mol_type = other RNA
ccacagttgcaattcaaatt

SEQ ID NO: 16076 - RNA, 20 nt, synthetic construct
  source 1..20: mol_type = other RNA
ccacatactacacacacaaa

SEQ ID NO: 16077 - RNA, 20 nt, synthetic construct
  source 1..20: mol_type = other RNA
ccacatataaaggacagctg

SEQ ID NO: 16078 - RNA, 20 nt, synthetic construct
  source 1..20: mol_type = other RNA
ccaccaaagtgtagcatcag

SEQ ID NO: 16079 - RNA, 20 nt, synthetic construct
  source 1..20: mol_type = other RNA
ccaccacaaattaaggcttg

SEQ ID NO: 16080 - RNA, 20 nt, synthetic construct
  source 1..20: mol_type = other RNA
ccaccccacaaagatatatg

SEQ ID NO: 16081 - RNA, 20 nt, synthetic construct
  source 1..20: mol_type = other RNA
ccacgcagtacaaactgctc

SEQ ID NO: 16082 - RNA, 20 nt, synthetic construct
  source 1..20: mol_type = other RNA
ccacgtattctgtaatccac

SEQ ID NO: 16083 - RNA, 20 nt, synthetic construct
  source 1..20: mol_type = other RNA
ccacttttccaatgctcaag

SEQ ID NO: 16084 - RNA, 20 nt, synthetic construct
  source 1..20: mol_type = other RNA
ccagaattactatgacccac

SEQ ID NO: 16085 - RNA, 20 nt, synthetic construct
  source 1..20: mol_type = other RNA
ccagacagattggttccacc

SEQ ID NO: 16086 - RNA, 20 nt, synthetic construct
  source 1..20: mol_type = other RNA
ccagagagcttcagctttta

SEQ ID NO: 16087 - RNA, 20 nt, synthetic construct
  source 1..20: mol_type = other RNA
ccagcagtgcttttattcct

SEQ ID NO: 16088 - RNA, 20 nt, synthetic construct
  source 1..20: mol_type = other RNA
ccagccacttttccaatgct

SEQ ID NO: 16089 - RNA, 20 nt, synthetic construct
  source 1..20: mol_type = other RNA
ccagcctaaatttctgtcct

SEQ ID NO: 16090 - RNA, 20 nt, synthetic construct
  source 1..20: mol_type = other RNA
ccagctaaggaaaaaggata

SEQ ID NO: 16091 - RNA, 20 nt, synthetic construct
  source 1..20: mol_type = other RNA
ccagctcaagccttaatttg

SEQ ID NO: 16092 - RNA, 20 nt, synthetic construct
  source 1..20: mol_type = other RNA
ccaggaagtgaaaacttgta

SEQ ID NO: 16093 - RNA, 20 nt, synthetic construct
  source 1..20: mol_type = other RNA
ccaggcatcttagcaactct

SEQ ID NO: 16094 - RNA, 20 nt, synthetic construct
  source 1..20: mol_type = other RNA
ccaggctacccaagatcaag

SEQ ID NO: 16095 - RNA, 20 nt, synthetic construct
  source 1..20: mol_type = other RNA
ccaggctctctacccctttg

SEQ ID NO: 16096 - RNA, 20 nt, synthetic construct
  source 1..20: mol_type = other RNA
ccagggaccttatgcatcac

SEQ ID NO: 16097 - RNA, 20 nt, synthetic construct
  source 1..20: mol_type = other RNA
ccaggtgatcttgactactg

SEQ ID NO: 16098 - RNA, 20 nt, synthetic construct
  source 1..20: mol_type = other RNA
ccagtaatggagtttcacct

SEQ ID NO: 16099 - RNA, 20 nt, synthetic construct
  source 1..20: mol_type = other RNA
ccagtgcttccctccctcac

SEQ ID NO: 16100 - RNA, 20 nt, synthetic construct
  source 1..20: mol_type = other RNA
ccagttagtaactgatctca

SEQ ID NO: 16101 - RNA, 20 nt, synthetic construct
  source 1..20: mol_type = other RNA
ccataaagacatttacatgt

SEQ ID NO: 16102 - RNA, 20 nt, synthetic construct
  source 1..20: mol_type = other RNA
ccatcaatgtccacgtattc

SEQ ID NO: 16103 - RNA, 20 nt, synthetic construct
  source 1..20: mol_type = other RNA
ccatcttacatcttgttagg

SEQ ID NO: 16104 - RNA, 20 nt, synthetic construct
  source 1..20: mol_type = other RNA
ccatgcggcccgcgggttag

SEQ ID NO: 16105 - RNA, 20 nt, synthetic construct
  source 1..20: mol_type = other RNA
ccatggaaggcatgaccaaa

SEQ ID NO: 16106 - RNA, 20 nt, synthetic construct
  source 1..20: mol_type = other RNA
ccatggtctgttgttctatg

SEQ ID NO: 16107 - RNA, 20 nt, synthetic construct
  source 1..20: mol_type = other RNA
ccatgtgacttcaggagaga

SEQ ID NO: 16108 - RNA, 20 nt, synthetic construct
  source 1..20: mol_type = other RNA
ccattaaactgttacaggag

SEQ ID NO: 16109 - RNA, 20 nt, synthetic construct
  source 1..20: mol_type = other RNA
ccattacatttcatttaact

SEQ ID NO: 16110 - RNA, 20 nt, synthetic construct
  source 1..20: mol_type = other RNA
ccattactggcttgtactgt

SEQ ID NO: 16111 - RNA, 20 nt, synthetic construct
  source 1..20: mol_type = other RNA
ccatttacttaaagttggct

SEQ ID NO: 16112 - RNA, 20 nt, synthetic construct
  source 1..20: mol_type = other RNA
ccatttgagacccttgctgc

SEQ ID NO: 16113 - RNA, 20 nt, synthetic construct
  source 1..20: mol_type = other RNA
ccatttgttgtacttgctcc

SEQ ID NO: 16114 - RNA, 20 nt, synthetic construct
  source 1..20: mol_type = other RNA
ccattttccatttgttgtac

SEQ ID NO: 16115 - RNA, 20 nt, synthetic construct
  source 1..20: mol_type = other RNA
ccatttttaaagatgtgcct

SEQ ID NO: 16116 - RNA, 20 nt, synthetic construct
  source 1..20: mol_type = other RNA
cccaaactgcccttttaaaa

SEQ ID NO: 16117 - RNA, 20 nt, synthetic construct
  source 1..20: mol_type = other RNA
cccaaatcatagagacgtca

SEQ ID NO: 16118 - RNA, 20 nt, synthetic construct
  source 1..20: mol_type = other RNA
cccaagacagttcttgcagt

SEQ ID NO: 16119 - RNA, 20 nt, synthetic construct
  source 1..20: mol_type = other RNA
cccaagatcaagagagggag

SEQ ID NO: 16120 - RNA, 20 nt, synthetic construct
  source 1..20: mol_type = other RNA
cccacaaagatatatgacgt

SEQ ID NO: 16121 - RNA, 20 nt, synthetic construct
  source 1..20: mol_type = other RNA
cccacgcagtacaaactgct

SEQ ID NO: 16122 - RNA, 20 nt, synthetic construct
  source 1..20: mol_type = other RNA
cccagaattactatgaccca

SEQ ID NO: 16123 - RNA, 20 nt, synthetic construct
  source 1..20: mol_type = other RNA
cccagcagtgcttttattcc

SEQ ID NO: 16124 - RNA, 20 nt, synthetic construct
  source 1..20: mol_type = other RNA
cccagcctaaatttctgtcc

SEQ ID NO: 16125 - RNA, 20 nt, synthetic construct
  source 1..20: mol_type = other RNA
cccagctaaggaaaaaggat

SEQ ID NO: 16126 - RNA, 20 nt, synthetic construct
  source 1..20: mol_type = other RNA
cccagctcaagccttaattt

SEQ ID NO: 16127 - RNA, 20 nt, synthetic construct
  source 1..20: mol_type = other RNA
cccaggctctctaccccttt

SEQ ID NO: 16128 - RNA, 20 nt, synthetic construct
  source 1..20: mol_type = other RNA
cccatgcggcccgcgggtta

SEQ ID NO: 16129 - RNA, 20 nt, synthetic construct
  source 1..20: mol_type = other RNA
cccattacatttcatttaac

SEQ ID NO: 16130 - RNA, 20 nt, synthetic construct
  source 1..20: mol_type = other RNA
cccattttccatttgttgta

SEQ ID NO: 16131 - RNA, 20 nt, synthetic construct
  source 1..20: mol_type = other RNA
ccccacaaagatatatgacg

SEQ ID NO: 16132 - RNA, 20 nt, synthetic construct
  source 1..20: mol_type = other RNA
ccccagaattactatgaccc

SEQ ID NO: 16133 - RNA, 20 nt, synthetic construct
  source 1..20: mol_type = other RNA
ccccagctcaagccttaatt

SEQ ID NO: 16134 - RNA, 20 nt, synthetic construct
  source 1..20: mol_type = other RNA
ccccaggctctctacccctt

SEQ ID NO: 16135 - RNA, 20 nt, synthetic construct
  source 1..20: mol_type = other RNA
ccccggacttgttctgtgga

SEQ ID NO: 16136 - RNA, 20 nt, synthetic construct
  source 1..20: mol_type = other RNA
cccctggtttacaggatgaa

SEQ ID NO: 16137 - RNA, 20 nt, synthetic construct
  source 1..20: mol_type = other RNA
cccctttgcatccctaccag

SEQ ID NO: 16138 - RNA, 20 nt, synthetic construct
  source 1..20: mol_type = other RNA
cccctttggtcatgccttcc

SEQ ID NO: 16139 - RNA, 20 nt, synthetic construct
  source 1..20: mol_type = other RNA
cccgcgggccgcatgggacc

SEQ ID NO: 16140 - RNA, 20 nt, synthetic construct
  source 1..20: mol_type = other RNA
cccgcgggttagacaacttg

SEQ ID NO: 16141 - RNA, 20 nt, synthetic construct
  source 1..20: mol_type = other RNA
cccggacttgttctgtggat

SEQ ID NO: 16142 - RNA, 20 nt, synthetic construct
  source 1..20: mol_type = other RNA
ccctaccaggcatcttagca

SEQ ID NO: 16143 - RNA, 20 nt, synthetic construct
  source 1..20: mol_type = other RNA
ccctagttcacgttcttaaa

SEQ ID NO: 16144 - RNA, 20 nt, synthetic construct
  source 1..20: mol_type = other RNA
ccctcaccctctctccccag

SEQ ID NO: 16145 - RNA, 20 nt, synthetic construct
  source 1..20: mol_type = other RNA
ccctccctcaccctctctcc

SEQ ID NO: 16146 - RNA, 20 nt, synthetic construct
  source 1..20: mol_type = other RNA
ccctctctccccaggctctc

SEQ ID NO: 16147 - RNA, 20 nt, synthetic construct
  source 1..20: mol_type = other RNA
ccctctcttgatcttgggta

SEQ ID NO: 16148 - RNA, 20 nt, synthetic construct
  source 1..20: mol_type = other RNA
ccctgaccgtcttcacagtc

SEQ ID NO: 16149 - RNA, 20 nt, synthetic construct
  source 1..20: mol_type = other RNA
ccctggatagactttcctca

SEQ ID NO: 16150 - RNA, 20 nt, synthetic construct
  source 1..20: mol_type = other RNA
ccctgggccacactgcaaga

SEQ ID NO: 16151 - RNA, 20 nt, synthetic construct
  source 1..20: mol_type = other RNA
ccctggtttacaggatgaat

SEQ ID NO: 16152 - RNA, 20 nt, synthetic construct
  source 1..20: mol_type = other RNA
cccttgctgcaccaccaaag

SEQ ID NO: 16153 - RNA, 20 nt, synthetic construct
  source 1..20: mol_type = other RNA
cccttgctgcttttaatcct

SEQ ID NO: 16154 - RNA, 20 nt, synthetic construct
  source 1..20: mol_type = other RNA
ccctttgcatccctaccagg

SEQ ID NO: 16155 - RNA, 20 nt, synthetic construct
  source 1..20: mol_type = other RNA
ccctttggtcatgccttcca

SEQ ID NO: 16156 - RNA, 20 nt, synthetic construct
  source 1..20: mol_type = other RNA
cccttttaaaaaagcagttt

SEQ ID NO: 16157 - RNA, 20 nt, synthetic construct
  source 1..20: mol_type = other RNA
ccctttttcttcctctaaat

SEQ ID NO: 16158 - RNA, 20 nt, synthetic construct
  source 1..20: mol_type = other RNA
ccgaaagattggacacccct

SEQ ID NO: 16159 - RNA, 20 nt, synthetic construct
  source 1..20: mol_type = other RNA
ccgcatgggacccaggacag

SEQ ID NO: 16160 - RNA, 20 nt, synthetic construct
  source 1..20: mol_type = other RNA
ccgcgggccgcatgggaccc

SEQ ID NO: 16161 - RNA, 20 nt, synthetic construct
  source 1..20: mol_type = other RNA
ccgcgggttagacaacttgc

SEQ ID NO: 16162 - RNA, 20 nt, synthetic construct
  source 1..20: mol_type = other RNA
ccggacttgttctgtggatt

SEQ ID NO: 16163 - RNA, 20 nt, synthetic construct
  source 1..20: mol_type = other RNA
ccggggctacagctatactg

SEQ ID NO: 16164 - RNA, 20 nt, synthetic construct
  source 1..20: mol_type = other RNA
ccgtcttcacagtccaggtg

SEQ ID NO: 16165 - RNA, 20 nt, synthetic construct
  source 1..20: mol_type = other RNA
cctaaaactttaagaaagtt

SEQ ID NO: 16166 - RNA, 20 nt, synthetic construct
  source 1..20: mol_type = other RNA
cctaaaggaagatagagcat

SEQ ID NO: 16167 - RNA, 20 nt, synthetic construct
  source 1..20: mol_type = other RNA
cctaaatttctgtcctacaa

SEQ ID NO: 16168 - RNA, 20 nt, synthetic construct
  source 1..20: mol_type = other RNA
cctaacaagatgtaagatgg

SEQ ID NO: 16169 - RNA, 20 nt, synthetic construct
  source 1..20: mol_type = other RNA
cctaacctcagatccaattc

SEQ ID NO: 16170 - RNA, 20 nt, synthetic construct
  source 1..20: mol_type = other RNA
cctacaagttttcacttcct

SEQ ID NO: 16171 - RNA, 20 nt, synthetic construct
  source 1..20: mol_type = other RNA
cctaccaggcatcttagcaa

SEQ ID NO: 16172 - RNA, 20 nt, synthetic construct
  source 1..20: mol_type = other RNA
cctagtatactctgatgtct

SEQ ID NO: 16173 - RNA, 20 nt, synthetic construct
  source 1..20: mol_type = other RNA
cctagttcacgttcttaaat

SEQ ID NO: 16174 - RNA, 20 nt, synthetic construct
  source 1..20: mol_type = other RNA
cctattcttcattcaagttc

SEQ ID NO: 16175 - RNA, 20 nt, synthetic construct
  source 1..20: mol_type = other RNA
cctcaatttaacagcttttt

SEQ ID NO: 16176 - RNA, 20 nt, synthetic construct
  source 1..20: mol_type = other RNA
cctcaccctctctccccagg

SEQ ID NO: 16177 - RNA, 20 nt, synthetic construct
  source 1..20: mol_type = other RNA
cctcagatccaattctctgt

SEQ ID NO: 16178 - RNA, 20 nt, synthetic construct
  source 1..20: mol_type = other RNA
cctcaggataaaacttactt

SEQ ID NO: 16179 - RNA, 20 nt, synthetic construct
  source 1..20: mol_type = other RNA
cctccaatcaagtgtttcca

SEQ ID NO: 16180 - RNA, 20 nt, synthetic construct
  source 1..20: mol_type = other RNA
cctccctaaaattcattatg

SEQ ID NO: 16181 - RNA, 20 nt, synthetic construct
  source 1..20: mol_type = other RNA
cctccctagttcacgttctt

SEQ ID NO: 16182 - RNA, 20 nt, synthetic construct
  source 1..20: mol_type = other RNA
cctccctcaccctctctccc

SEQ ID NO: 16183 - RNA, 20 nt, synthetic construct
  source 1..20: mol_type = other RNA
cctctaaatacctctcattt

SEQ ID NO: 16184 - RNA, 20 nt, synthetic construct
  source 1..20: mol_type = other RNA
cctctagtattcagacatag

SEQ ID NO: 16185 - RNA, 20 nt, synthetic construct
  source 1..20: mol_type = other RNA
cctctcatttctgttcttac

SEQ ID NO: 16186 - RNA, 20 nt, synthetic construct
  source 1..20: mol_type = other RNA
cctctctccccaggctctct

SEQ ID NO: 16187 - RNA, 20 nt, synthetic construct
  source 1..20: mol_type = other RNA
cctctctcctgaagtcacat

SEQ ID NO: 16188 - RNA, 20 nt, synthetic construct
  source 1..20: mol_type = other RNA
cctctcttgatcttgggtag

SEQ ID NO: 16189 - RNA, 20 nt, synthetic construct
  source 1..20: mol_type = other RNA
cctgaagtcacatggaatga

SEQ ID NO: 16190 - RNA, 20 nt, synthetic construct
  source 1..20: mol_type = other RNA
cctgaccgtcttcacagtcc

SEQ ID NO: 16191 - RNA, 20 nt, synthetic construct
  source 1..20: mol_type = other RNA
cctgagcagtttgtactgcg

SEQ ID NO: 16192 - RNA, 20 nt, synthetic construct
  source 1..20: mol_type = other RNA
cctgagctcctagtatactc

SEQ ID NO: 16193 - RNA, 20 nt, synthetic construct
  source 1..20: mol_type = other RNA
cctgaggaattataatacca

SEQ ID NO: 16194 - RNA, 20 nt, synthetic construct
  source 1..20: mol_type = other RNA
cctgagttttataccatttg

SEQ ID NO: 16195 - RNA, 20 nt, synthetic construct
  source 1..20: mol_type = other RNA
cctgatgctacactttggtg

SEQ ID NO: 16196 - RNA, 20 nt, synthetic construct
  source 1..20: mol_type = other RNA
cctgcagattcaaatgtcat

SEQ ID NO: 16197 - RNA, 20 nt, synthetic construct
  source 1..20: mol_type = other RNA
cctgccttggacaacagtga

SEQ ID NO: 16198 - RNA, 20 nt, synthetic construct
  source 1..20: mol_type = other RNA
cctggaaacacttgattgga

SEQ ID NO: 16199 - RNA, 20 nt, synthetic construct
  source 1..20: mol_type = other RNA
cctggactgtgaagacggtc

SEQ ID NO: 16200 - RNA, 20 nt, synthetic construct
  source 1..20: mol_type = other RNA
cctggatagactttcctcaa

SEQ ID NO: 16201 - RNA, 20 nt, synthetic construct
  source 1..20: mol_type = other RNA
cctgggccacactgcaagaa

SEQ ID NO: 16202 - RNA, 20 nt, synthetic construct
  source 1..20: mol_type = other RNA
cctggggagagagggtgagg

SEQ ID NO: 16203 - RNA, 20 nt, synthetic construct
  source 1..20: mol_type = other RNA
cctgggtcccatgcggcccg

SEQ ID NO: 16204 - RNA, 20 nt, synthetic construct
  source 1..20: mol_type = other RNA
cctggtagggatgcaaaggg

SEQ ID NO: 16205 - RNA, 20 nt, synthetic construct
  source 1..20: mol_type = other RNA
cctggtgtctcgcgaaacca

SEQ ID NO: 16206 - RNA, 20 nt, synthetic construct
  source 1..20: mol_type = other RNA
cctggtttacaggatgaatt

SEQ ID NO: 16207 - RNA, 20 nt, synthetic construct
  source 1..20: mol_type = other RNA
cctgtaaaccaggggtgtcc

SEQ ID NO: 16208 - RNA, 20 nt, synthetic construct
  source 1..20: mol_type = other RNA
cctgtaacagtttaatggaa

SEQ ID NO: 16209 - RNA, 20 nt, synthetic construct
  source 1..20: mol_type = other RNA
cctgtcattttcatgctcta

SEQ ID NO: 16210 - RNA, 20 nt, synthetic construct
  source 1..20: mol_type = other RNA
cctgtgtgatagcttccaaa

SEQ ID NO: 16211 - RNA, 20 nt, synthetic construct
  source 1..20: mol_type = other RNA
ccttaactattctgagcttt

SEQ ID NO: 16212 - RNA, 20 nt, synthetic construct
  source 1..20: mol_type = other RNA
ccttaatttgtggtggaacc

SEQ ID NO: 16213 - RNA, 20 nt, synthetic construct
  source 1..20: mol_type = other RNA
ccttactgctcagtaaaaag

SEQ ID NO: 16214 - RNA, 20 nt, synthetic construct
  source 1..20: mol_type = other RNA
ccttagctgggattctgtcc

SEQ ID NO: 16215 - RNA, 20 nt, synthetic construct
  source 1..20: mol_type = other RNA
ccttatgcatcacattcacg

SEQ ID NO: 16216 - RNA, 20 nt, synthetic construct
  source 1..20: mol_type = other RNA
ccttcaaaaagctcagaata

SEQ ID NO: 16217 - RNA, 20 nt, synthetic construct
  source 1..20: mol_type = other RNA
ccttccatggtctgttgttc

SEQ ID NO: 16218 - RNA, 20 nt, synthetic construct
  source 1..20: mol_type = other RNA
ccttgctgcaccaccaaagt

SEQ ID NO: 16219 - RNA, 20 nt, synthetic construct
  source 1..20: mol_type = other RNA
ccttgctgcttttaatcctg

SEQ ID NO: 16220 - RNA, 20 nt, synthetic construct
  source 1..20: mol_type = other RNA
ccttggacaacagtgaaagc

SEQ ID NO: 16221 - RNA, 20 nt, synthetic construct
  source 1..20: mol_type = other RNA
cctttaggacaatcatccta

SEQ ID NO: 16222 - RNA, 20 nt, synthetic construct
  source 1..20: mol_type = other RNA
cctttatatgtggcccaaga

SEQ ID NO: 16223 - RNA, 20 nt, synthetic construct
  source 1..20: mol_type = other RNA
cctttgcatccctaccaggc

SEQ ID NO: 16224 - RNA, 20 nt, synthetic construct
  source 1..20: mol_type = other RNA
cctttggtcatgccttccat

SEQ ID NO: 16225 - RNA, 20 nt, synthetic construct
  source 1..20: mol_type = other RNA
ccttttaaaaaagcagtttt

SEQ ID NO: 16226 - RNA, 20 nt, synthetic construct
  source 1..20: mol_type = other RNA
cctttttccttagctgggat

SEQ ID NO: 16227 - RNA, 20 nt, synthetic construct
  source 1..20: mol_type = other RNA
cctttttcttcctctaaata

SEQ ID NO: 16228 - RNA, 20 nt, synthetic construct
  source 1..20: mol_type = other RNA
cgaaaccagacagattggtt

SEQ ID NO: 16229 - RNA, 20 nt, synthetic construct
  source 1..20: mol_type = other RNA
cgaaagattggacacccctg

SEQ ID NO: 16230 - RNA, 20 nt, synthetic construct
  source 1..20: mol_type = other RNA
cgacatgtaaatgtctttat

SEQ ID NO: 16231 - RNA, 20 nt, synthetic construct
  source 1..20: mol_type = other RNA
cgagaacagaattcatcctg

SEQ ID NO: 16232 - RNA, 20 nt, synthetic construct
  source 1..20: mol_type = other RNA
cgagacaccaggctacccaa

SEQ ID NO: 16233 - RNA, 20 nt, synthetic construct
  source 1..20: mol_type = other RNA
cgagactgcggattatcact

SEQ ID NO: 16234 - RNA, 20 nt, synthetic construct
  source 1..20: mol_type = other RNA
cgcagtacaaactgctcagg

SEQ ID NO: 16235 - RNA, 20 nt, synthetic construct
  source 1..20: mol_type = other RNA
cgcatgggacccaggacagc

SEQ ID NO: 16236 - RNA, 20 nt, synthetic construct
  source 1..20: mol_type = other RNA
cgcattcaaagctgtcctgg

SEQ ID NO: 16237 - RNA, 20 nt, synthetic construct
  source 1..20: mol_type = other RNA
cgcgaaaccagacagattgg

SEQ ID NO: 16238 - RNA, 20 nt, synthetic construct
  source 1..20: mol_type = other RNA
cgcgagacaccaggctaccc

SEQ ID NO: 16239 - RNA, 20 nt, synthetic construct
  source 1..20: mol_type = other RNA
cgcgggccgcatgggaccca

SEQ ID NO: 16240 - RNA, 20 nt, synthetic construct
  source 1..20: mol_type = other RNA
cgcgggttagacaacttgct

SEQ ID NO: 16241 - RNA, 20 nt, synthetic construct
  source 1..20: mol_type = other RNA
cgctcactccatttacttaa

SEQ ID NO: 16242 - RNA, 20 nt, synthetic construct
  source 1..20: mol_type = other RNA
cgcttgctttcactgttgtc

SEQ ID NO: 16243 - RNA, 20 nt, synthetic construct
  source 1..20: mol_type = other RNA
cggacttgttctgtggatta

SEQ ID NO: 16244 - RNA, 20 nt, synthetic construct
  source 1..20: mol_type = other RNA
cggattatcactacttatca

SEQ ID NO: 16245 - RNA, 20 nt, synthetic construct
  source 1..20: mol_type = other RNA
cggcccgcgggttagacaac

SEQ ID NO: 16246 - RNA, 20 nt, synthetic construct
  source 1..20: mol_type = other RNA
cggcttccctgggccacact

SEQ ID NO: 16247 - RNA, 20 nt, synthetic construct
  source 1..20: mol_type = other RNA
cgggccgcatgggacccagg

SEQ ID NO: 16248 - RNA, 20 nt, synthetic construct
  source 1..20: mol_type = other RNA
cggggctacagctatactgt

SEQ ID NO: 16249 - RNA, 20 nt, synthetic construct
  source 1..20: mol_type = other RNA
cgggttagacaacttgctgt

SEQ ID NO: 16250 - RNA, 20 nt, synthetic construct
  source 1..20: mol_type = other RNA
cggtcagggacagaatccca

SEQ ID NO: 16251 - RNA, 20 nt, synthetic construct
  source 1..20: mol_type = other RNA
cgtaaactttcttaaagttt

SEQ ID NO: 16252 - RNA, 20 nt, synthetic construct
  source 1..20: mol_type = other RNA
cgtattctgtaatccacaga

SEQ ID NO: 16253 - RNA, 20 nt, synthetic construct
  source 1..20: mol_type = other RNA
cgtcatatatctttgtgggg

SEQ ID NO: 16254 - RNA, 20 nt, synthetic construct
  source 1..20: mol_type = other RNA
cgtctctatgatttgggtaa

SEQ ID NO: 16255 - RNA, 20 nt, synthetic construct
  source 1..20: mol_type = other RNA
cgtcttcacagtccaggtga

SEQ ID NO: 16256 - RNA, 20 nt, synthetic construct
  source 1..20: mol_type = other RNA
cgtgaactagggaggaataa

SEQ ID NO: 16257 - RNA, 20 nt, synthetic construct
  source 1..20: mol_type = other RNA
cgtgaatgtgatgcataagg

SEQ ID NO: 16258 - RNA, 20 nt, synthetic construct
  source 1..20: mol_type = other RNA
cgtggacattgatggttttc

SEQ ID NO: 16259 - RNA, 20 nt, synthetic construct
  source 1..20: mol_type = other RNA
cgtgggtcatagtaattctg

SEQ ID NO: 16260 - RNA, 20 nt, synthetic construct
  source 1..20: mol_type = other RNA
cgttcttaaatgtttatctt

SEQ ID NO: 16261 - RNA, 20 nt, synthetic construct
  source 1..20: mol_type = other RNA
ctaaagacagagacagcaat

SEQ ID NO: 16262 - RNA, 20 nt, synthetic construct
  source 1..20: mol_type = other RNA
ctaaaggaagatagagcatg

SEQ ID NO: 16263 - RNA, 20 nt, synthetic construct
  source 1..20: mol_type = other RNA
ctaaatacctctcatttctg

SEQ ID NO: 16264 - RNA, 20 nt, synthetic construct
  source 1..20: mol_type = other RNA
ctaaatttctgtcctacaag

SEQ ID NO: 16265 - RNA, 20 nt, synthetic construct
  source 1..20: mol_type = other RNA
ctaacaagatgtaagatgga

SEQ ID NO: 16266 - RNA, 20 nt, synthetic construct
  source 1..20: mol_type = other RNA
ctaacccgcgggccgcatgg

SEQ ID NO: 16267 - RNA, 20 nt, synthetic construct
  source 1..20: mol_type = other RNA
ctaacctcagatccaattct

SEQ ID NO: 16268 - RNA, 20 nt, synthetic construct
  source 1..20: mol_type = other RNA
ctaactggtaagaacagaaa

SEQ ID NO: 16269 - RNA, 20 nt, synthetic construct
  source 1..20: mol_type = other RNA
ctaagatgcctggtagggat

SEQ ID NO: 16270 - RNA, 20 nt, synthetic construct
  source 1..20: mol_type = other RNA
ctaagcatcatatcttgagt

SEQ ID NO: 16271 - RNA, 20 nt, synthetic construct
  source 1..20: mol_type = other RNA
ctaaggaaaaaggataaaat

SEQ ID NO: 16272 - RNA, 20 nt, synthetic construct
  source 1..20: mol_type = other RNA
ctaagtccaacaaaccattt

SEQ ID NO: 16273 - RNA, 20 nt, synthetic construct
  source 1..20: mol_type = other RNA
ctaatttgaattgcaactgt

SEQ ID NO: 16274 - RNA, 20 nt, synthetic construct
  source 1..20: mol_type = other RNA
ctacaagttttcacttcctg

SEQ ID NO: 16275 - RNA, 20 nt, synthetic construct
  source 1..20: mol_type = other RNA
ctacacacacaaatatgacc

SEQ ID NO: 16276 - RNA, 20 nt, synthetic construct
  source 1..20: mol_type = other RNA
ctacactttggtggtgcagc

SEQ ID NO: 16277 - RNA, 20 nt, synthetic construct
  source 1..20: mol_type = other RNA
ctacagctatactgtccaca

SEQ ID NO: 16278 - RNA, 20 nt, synthetic construct
  source 1..20: mol_type = other RNA
ctacatagttaaatatatca

SEQ ID NO: 16279 - RNA, 20 nt, synthetic construct
  source 1..20: mol_type = other RNA
ctaccaggcatcttagcaac

SEQ ID NO: 16280 - RNA, 20 nt, synthetic construct
  source 1..20: mol_type = other RNA
ctacccaagatcaagagagg

SEQ ID NO: 16281 - RNA, 20 nt, synthetic construct
  source 1..20: mol_type = other RNA
ctacccctttgcatccctac

SEQ ID NO: 16282 - RNA, 20 nt, synthetic construct
  source 1..20: mol_type = other RNA
ctacccttgctgcttttaat

SEQ ID NO: 16283 - RNA, 20 nt, synthetic construct
  source 1..20: mol_type = other RNA
ctactgctttacagagaatt

SEQ ID NO: 16284 - RNA, 20 nt, synthetic construct
  source 1..20: mol_type = other RNA
ctacttatcatttttggagc

SEQ ID NO: 16285 - RNA, 20 nt, synthetic construct
  source 1..20: mol_type = other RNA
ctagaaaaatgctccaaaaa

SEQ ID NO: 16286 - RNA, 20 nt, synthetic construct
  source 1..20: mol_type = other RNA
ctagacatcagagtatacta

SEQ ID NO: 16287 - RNA, 20 nt, synthetic construct
  source 1..20: mol_type = other RNA
ctagagacagacataaagca

SEQ ID NO: 16288 - RNA, 20 nt, synthetic construct
  source 1..20: mol_type = other RNA
ctagaggagcaagtacaaca

SEQ ID NO: 16289 - RNA, 20 nt, synthetic construct
  source 1..20: mol_type = other RNA
ctagccaactttaagtaaat

SEQ ID NO: 16290 - RNA, 20 nt, synthetic construct
  source 1..20: mol_type = other RNA
ctagctttctccctctcttg

SEQ ID NO: 16291 - RNA, 20 nt, synthetic construct
  source 1..20: mol_type = other RNA
ctaggagctcaggagtacaa

SEQ ID NO: 16292 - RNA, 20 nt, synthetic construct
  source 1..20: mol_type = other RNA
ctagggaggaataaaagcac

SEQ ID NO: 16293 - RNA, 20 nt, synthetic construct
  source 1..20: mol_type = other RNA
ctagtatactctgatgtcta

SEQ ID NO: 16294 - RNA, 20 nt, synthetic construct
  source 1..20: mol_type = other RNA
ctagtattcagacatagcac

SEQ ID NO: 16295 - RNA, 20 nt, synthetic construct
  source 1..20: mol_type = other RNA
ctagtgctatgtctgaatac

SEQ ID NO: 16296 - RNA, 20 nt, synthetic construct
  source 1..20: mol_type = other RNA
ctagttcacgttcttaaatg

SEQ ID NO: 16297 - RNA, 20 nt, synthetic construct
  source 1..20: mol_type = other RNA
ctataactcaagatatgatg

SEQ ID NO: 16298 - RNA, 20 nt, synthetic construct
  source 1..20: mol_type = other RNA
ctatactgtccacagttgca

SEQ ID NO: 16299 - RNA, 20 nt, synthetic construct
  source 1..20: mol_type = other RNA
ctatcacacaggcatctgag

SEQ ID NO: 16300 - RNA, 20 nt, synthetic construct
  source 1..20: mol_type = other RNA
ctatccagggaccttatgca

SEQ ID NO: 16301 - RNA, 20 nt, synthetic construct
  source 1..20: mol_type = other RNA
ctatcttcctttaggacaat

SEQ ID NO: 16302 - RNA, 20 nt, synthetic construct
  source 1..20: mol_type = other RNA
ctatgacccaaactgccctt

SEQ ID NO: 16303 - RNA, 20 nt, synthetic construct
  source 1..20: mol_type = other RNA
ctatgacccacgcagtacaa

SEQ ID NO: 16304 - RNA, 20 nt, synthetic construct
  source 1..20: mol_type = other RNA
ctatgatttgggtaactgca

SEQ ID NO: 16305 - RNA, 20 nt, synthetic construct
  source 1..20: mol_type = other RNA
ctatgtagctcctgtaacag

SEQ ID NO: 16306 - RNA, 20 nt, synthetic construct
  source 1..20: mol_type = other RNA
ctatgtctgaatactagagg

SEQ ID NO: 16307 - RNA, 20 nt, synthetic construct
  source 1..20: mol_type = other RNA
ctattaagatttaacctgat

SEQ ID NO: 16308 - RNA, 20 nt, synthetic construct
  source 1..20: mol_type = other RNA
ctattccttcaaaaagctca

SEQ ID NO: 16309 - RNA, 20 nt, synthetic construct
  source 1..20: mol_type = other RNA
ctattctgagctttttgaag

SEQ ID NO: 16310 - RNA, 20 nt, synthetic construct
  source 1..20: mol_type = other RNA
ctattcttcattcaagttct

SEQ ID NO: 16311 - RNA, 20 nt, synthetic construct
  source 1..20: mol_type = other RNA
ctattttccacatactacac

SEQ ID NO: 16312 - RNA, 20 nt, synthetic construct
  source 1..20: mol_type = other RNA
ctcaaatggtataaaactca

SEQ ID NO: 16313 - RNA, 20 nt, synthetic construct
  source 1..20: mol_type = other RNA
ctcaagatatgatgcttaga

SEQ ID NO: 16314 - RNA, 20 nt, synthetic construct
  source 1..20: mol_type = other RNA
ctcaagattaataaaatgtc

SEQ ID NO: 16315 - RNA, 20 nt, synthetic construct
  source 1..20: mol_type = other RNA
ctcaagcaaaagctaaaatt

SEQ ID NO: 16316 - RNA, 20 nt, synthetic construct
  source 1..20: mol_type = other RNA
ctcaagccttaatttgtggt

SEQ ID NO: 16317 - RNA, 20 nt, synthetic construct
  source 1..20: mol_type = other RNA
ctcaatttaacagctttttc

SEQ ID NO: 16318 - RNA, 20 nt, synthetic construct
  source 1..20: mol_type = other RNA
ctcaccctctctccccaggc

SEQ ID NO: 16319 - RNA, 20 nt, synthetic construct
  source 1..20: mol_type = other RNA
ctcacctccctaaaattcat

SEQ ID NO: 16320 - RNA, 20 nt, synthetic construct
  source 1..20: mol_type = other RNA
ctcactcatacttgatccca

SEQ ID NO: 16321 - RNA, 20 nt, synthetic construct
  source 1..20: mol_type = other RNA
ctcactccatttacttaaag

SEQ ID NO: 16322 - RNA, 20 nt, synthetic construct
  source 1..20: mol_type = other RNA
ctcagaatagttaaggtaat

SEQ ID NO: 16323 - RNA, 20 nt, synthetic construct
  source 1..20: mol_type = other RNA
ctcagatccaattctctgta

SEQ ID NO: 16324 - RNA, 20 nt, synthetic construct
  source 1..20: mol_type = other RNA
ctcagatgcctgtgtgatag

SEQ ID NO: 16325 - RNA, 20 nt, synthetic construct
  source 1..20: mol_type = other RNA
ctcaggagtacaagacacta

SEQ ID NO: 16326 - RNA, 20 nt, synthetic construct
  source 1..20: mol_type = other RNA
ctcaggagtcagaagaaaac

SEQ ID NO: 16327 - RNA, 20 nt, synthetic construct
  source 1..20: mol_type = other RNA
ctcaggataaaacttacttt

SEQ ID NO: 16328 - RNA, 20 nt, synthetic construct
  source 1..20: mol_type = other RNA
ctcaggtgatcatgctttat

SEQ ID NO: 16329 - RNA, 20 nt, synthetic construct
  source 1..20: mol_type = other RNA
ctcagtaaaaagagaaaacc

SEQ ID NO: 16330 - RNA, 20 nt, synthetic construct
  source 1..20: mol_type = other RNA
ctcatacttgatcccatttt

SEQ ID NO: 16331 - RNA, 20 nt, synthetic construct
  source 1..20: mol_type = other RNA
ctcatcagctgtcctttata

SEQ ID NO: 16332 - RNA, 20 nt, synthetic construct
  source 1..20: mol_type = other RNA
ctcattaacgcttgctttca

SEQ ID NO: 16333 - RNA, 20 nt, synthetic construct
  source 1..20: mol_type = other RNA
ctcatttctgttcttaccag

SEQ ID NO: 16334 - RNA, 20 nt, synthetic construct
  source 1..20: mol_type = other RNA
ctccaaaaatgataagtagt

SEQ ID NO: 16335 - RNA, 20 nt, synthetic construct
  source 1..20: mol_type = other RNA
ctccaatcaagtgtttccag

SEQ ID NO: 16336 - RNA, 20 nt, synthetic construct
  source 1..20: mol_type = other RNA
ctccattactggcttgtact

SEQ ID NO: 16337 - RNA, 20 nt, synthetic construct
  source 1..20: mol_type = other RNA
ctccatttacttaaagttgg

SEQ ID NO: 16338 - RNA, 20 nt, synthetic construct
  source 1..20: mol_type = other RNA
ctccccaggctctctacccc

SEQ ID NO: 16339 - RNA, 20 nt, synthetic construct
  source 1..20: mol_type = other RNA
ctcccctttggtcatgcctt

SEQ ID NO: 16340 - RNA, 20 nt, synthetic construct
  source 1..20: mol_type = other RNA
ctccctagttcacgttctta

SEQ ID NO: 16341 - RNA, 20 nt, synthetic construct
  source 1..20: mol_type = other RNA
ctccctcaccctctctcccc

SEQ ID NO: 16342 - RNA, 20 nt, synthetic construct
  source 1..20: mol_type = other RNA
ctccctctcttgatcttggg

SEQ ID NO: 16343 - RNA, 20 nt, synthetic construct
  source 1..20: mol_type = other RNA
ctccctttttcttcctctaa

SEQ ID NO: 16344 - RNA, 20 nt, synthetic construct
  source 1..20: mol_type = other RNA
ctcctaaaactttaagaaag

SEQ ID NO: 16345 - RNA, 20 nt, synthetic construct
  source 1..20: mol_type = other RNA
ctcctagtatactctgatgt

SEQ ID NO: 16346 - RNA, 20 nt, synthetic construct
  source 1..20: mol_type = other RNA
ctcctccaatcaagtgtttc

SEQ ID NO: 16347 - RNA, 20 nt, synthetic construct
  source 1..20: mol_type = other RNA
ctcctctagtattcagacat

SEQ ID NO: 16348 - RNA, 20 nt, synthetic construct
  source 1..20: mol_type = other RNA
ctcctgaagtcacatggaat

SEQ ID NO: 16349 - RNA, 20 nt, synthetic construct
  source 1..20: mol_type = other RNA
ctcctgagcagtttgtactg

SEQ ID NO: 16350 - RNA, 20 nt, synthetic construct
  source 1..20: mol_type = other RNA
ctcctgagctcctagtatac

SEQ ID NO: 16351 - RNA, 20 nt, synthetic construct
  source 1..20: mol_type = other RNA
ctcctgtaacagtttaatgg

SEQ ID NO: 16352 - RNA, 20 nt, synthetic construct
  source 1..20: mol_type = other RNA
ctcgcgaaaccagacagatt

SEQ ID NO: 16353 - RNA, 20 nt, synthetic construct
  source 1..20: mol_type = other RNA
ctcgtgaatgtgatgcataa

SEQ ID NO: 16354 - RNA, 20 nt, synthetic construct
  source 1..20: mol_type = other RNA
ctctaaatacctctcatttc

SEQ ID NO: 16355 - RNA, 20 nt, synthetic construct
  source 1..20: mol_type = other RNA
ctctaagcatcatatcttga

SEQ ID NO: 16356 - RNA, 20 nt, synthetic construct
  source 1..20: mol_type = other RNA
ctctacccctttgcatccct

SEQ ID NO: 16357 - RNA, 20 nt, synthetic construct
  source 1..20: mol_type = other RNA
ctctagaaaaatgctccaaa

SEQ ID NO: 16358 - RNA, 20 nt, synthetic construct
  source 1..20: mol_type = other RNA
ctctagtattcagacatagc

SEQ ID NO: 16359 - RNA, 20 nt, synthetic construct
  source 1..20: mol_type = other RNA
ctctatcttcctttaggaca

SEQ ID NO: 16360 - RNA, 20 nt, synthetic construct
  source 1..20: mol_type = other RNA
ctctatgatttgggtaactg

SEQ ID NO: 16361 - RNA, 20 nt, synthetic construct
  source 1..20: mol_type = other RNA
ctctcactcatacttgatcc

SEQ ID NO: 16362 - RNA, 20 nt, synthetic construct
  source 1..20: mol_type = other RNA
ctctcatttctgttcttacc

SEQ ID NO: 16363 - RNA, 20 nt, synthetic construct
  source 1..20: mol_type = other RNA
ctctccccaggctctctacc

SEQ ID NO: 16364 - RNA, 20 nt, synthetic construct
  source 1..20: mol_type = other RNA
ctctcctgaagtcacatgga

SEQ ID NO: 16365 - RNA, 20 nt, synthetic construct
  source 1..20: mol_type = other RNA
ctctctacccctttgcatcc

SEQ ID NO: 16366 - RNA, 20 nt, synthetic construct
  source 1..20: mol_type = other RNA
ctctctccccaggctctcta

SEQ ID NO: 16367 - RNA, 20 nt, synthetic construct
  source 1..20: mol_type = other RNA
ctctctcctgaagtcacatg

SEQ ID NO: 16368 - RNA, 20 nt, synthetic construct
  source 1..20: mol_type = other RNA
ctctctggcccattacattt

SEQ ID NO: 16369 - RNA, 20 nt, synthetic construct
  source 1..20: mol_type = other RNA
ctctcttgatcttgggtagc

SEQ ID NO: 16370 - RNA, 20 nt, synthetic construct
  source 1..20: mol_type = other RNA
ctctgatgtctagccaactt

SEQ ID NO: 16371 - RNA, 20 nt, synthetic construct
  source 1..20: mol_type = other RNA
ctctggcccattacatttca

SEQ ID NO: 16372 - RNA, 20 nt, synthetic construct
  source 1..20: mol_type = other RNA
ctctgtaaagcagtagtcaa

SEQ ID NO: 16373 - RNA, 20 nt, synthetic construct
  source 1..20: mol_type = other RNA
ctctgtctttagtgttatct

SEQ ID NO: 16374 - RNA, 20 nt, synthetic construct
  source 1..20: mol_type = other RNA
ctcttacccagcagtgcttt

SEQ ID NO: 16375 - RNA, 20 nt, synthetic construct
  source 1..20: mol_type = other RNA
ctcttgatcttgggtagcct

SEQ ID NO: 16376 - RNA, 20 nt, synthetic construct
  source 1..20: mol_type = other RNA
ctctttttactgagcagtaa

SEQ ID NO: 16377 - RNA, 20 nt, synthetic construct
  source 1..20: mol_type = other RNA
ctgaaagctaagtccaacaa

SEQ ID NO: 16378 - RNA, 20 nt, synthetic construct
  source 1..20: mol_type = other RNA
ctgaagctctctggcccatt

SEQ ID NO: 16379 - RNA, 20 nt, synthetic construct
  source 1..20: mol_type = other RNA
ctgaagtcacatggaatgaa

SEQ ID NO: 16380 - RNA, 20 nt, synthetic construct
  source 1..20: mol_type = other RNA
ctgaatactagaggagcaag

SEQ ID NO: 16381 - RNA, 20 nt, synthetic construct
  source 1..20: mol_type = other RNA
ctgaccgtcttcacagtcca

SEQ ID NO: 16382 - RNA, 20 nt, synthetic construct
  source 1..20: mol_type = other RNA
ctgactcctgagcagtttgt

SEQ ID NO: 16383 - RNA, 20 nt, synthetic construct
  source 1..20: mol_type = other RNA
ctgagatcagttactaactg

SEQ ID NO: 16384 - RNA, 20 nt, synthetic construct
  source 1..20: mol_type = other RNA
ctgagcagtaaggaaataaa

SEQ ID NO: 16385 - RNA, 20 nt, synthetic construct
  source 1..20: mol_type = other RNA
ctgagcagtttgtactgcgt

SEQ ID NO: 16386 - RNA, 20 nt, synthetic construct
  source 1..20: mol_type = other RNA
ctgagctcctagtatactct

SEQ ID NO: 16387 - RNA, 20 nt, synthetic construct
  source 1..20: mol_type = other RNA
ctgagctttttgaaggaata

SEQ ID NO: 16388 - RNA, 20 nt, synthetic construct
  source 1..20: mol_type = other RNA
ctgaggaattataataccaa

SEQ ID NO: 16389 - RNA, 20 nt, synthetic construct
  source 1..20: mol_type = other RNA
ctgaggttaggcaacatctc

SEQ ID NO: 16390 - RNA, 20 nt, synthetic construct
  source 1..20: mol_type = other RNA
ctgagttttataccatttga

SEQ ID NO: 16391 - RNA, 20 nt, synthetic construct
  source 1..20: mol_type = other RNA
ctgatatatttaactatgta

SEQ ID NO: 16392 - RNA, 20 nt, synthetic construct
  source 1..20: mol_type = other RNA
ctgatctcagatgcctgtgt

SEQ ID NO: 16393 - RNA, 20 nt, synthetic construct
  source 1..20: mol_type = other RNA
ctgatgctacactttggtgg

SEQ ID NO: 16394 - RNA, 20 nt, synthetic construct
  source 1..20: mol_type = other RNA
ctgatgtctagccaacttta

SEQ ID NO: 16395 - RNA, 20 nt, synthetic construct
  source 1..20: mol_type = other RNA
ctgatttaaattaccttaac

SEQ ID NO: 16396 - RNA, 20 nt, synthetic construct
  source 1..20: mol_type = other RNA
ctgcaagaactgtcttgggc

SEQ ID NO: 16397 - RNA, 20 nt, synthetic construct
  source 1..20: mol_type = other RNA
ctgcaattcattccatgtga

SEQ ID NO: 16398 - RNA, 20 nt, synthetic construct
  source 1..20: mol_type = other RNA
ctgcaccaccaaagtgtagc

SEQ ID NO: 16399 - RNA, 20 nt, synthetic construct
  source 1..20: mol_type = other RNA
ctgcagattcaaatgtcatc

SEQ ID NO: 16400 - RNA, 20 nt, synthetic construct
  source 1..20: mol_type = other RNA
ctgcaggattaaaagcagca

SEQ ID NO: 16401 - RNA, 20 nt, synthetic construct
  source 1..20: mol_type = other RNA
ctgcccttttaaaaaagcag

SEQ ID NO: 16402 - RNA, 20 nt, synthetic construct
  source 1..20: mol_type = other RNA
ctgccttggacaacagtgaa

SEQ ID NO: 16403 - RNA, 20 nt, synthetic construct
  source 1..20: mol_type = other RNA
ctgcggattatcactactta

SEQ ID NO: 16404 - RNA, 20 nt, synthetic construct
  source 1..20: mol_type = other RNA
ctgcgtgggtcatagtaatt

SEQ ID NO: 16405 - RNA, 20 nt, synthetic construct
  source 1..20: mol_type = other RNA
ctgctcaggagtcagaagaa

SEQ ID NO: 16406 - RNA, 20 nt, synthetic construct
  source 1..20: mol_type = other RNA
ctgctcagtaaaaagagaaa

SEQ ID NO: 16407 - RNA, 20 nt, synthetic construct
  source 1..20: mol_type = other RNA
ctgctgggtaagagtcaagc

SEQ ID NO: 16408 - RNA, 20 nt, synthetic construct
  source 1..20: mol_type = other RNA
ctgctttacagagaattgga

SEQ ID NO: 16409 - RNA, 20 nt, synthetic construct
  source 1..20: mol_type = other RNA
ctgcttttaatcctgcagat

SEQ ID NO: 16410 - RNA, 20 nt, synthetic construct
  source 1..20: mol_type = other RNA
ctgcttttttaaaagggcag

SEQ ID NO: 16411 - RNA, 20 nt, synthetic construct
  source 1..20: mol_type = other RNA
ctggaaacacttgattggag

SEQ ID NO: 16412 - RNA, 20 nt, synthetic construct
  source 1..20: mol_type = other RNA
ctggactgtgaagacggtca

SEQ ID NO: 16413 - RNA, 20 nt, synthetic construct
  source 1..20: mol_type = other RNA
ctggatagactttcctcaat

SEQ ID NO: 16414 - RNA, 20 nt, synthetic construct
  source 1..20: mol_type = other RNA
ctggcccattacatttcatt

SEQ ID NO: 16415 - RNA, 20 nt, synthetic construct
  source 1..20: mol_type = other RNA
ctggcttgtactgtttacag

SEQ ID NO: 16416 - RNA, 20 nt, synthetic construct
  source 1..20: mol_type = other RNA
ctgggattctgtccctgacc

SEQ ID NO: 16417 - RNA, 20 nt, synthetic construct
  source 1..20: mol_type = other RNA
ctgggccacactgcaagaac

SEQ ID NO: 16418 - RNA, 20 nt, synthetic construct
  source 1..20: mol_type = other RNA
ctggggagagagggtgaggg

SEQ ID NO: 16419 - RNA, 20 nt, synthetic construct
  source 1..20: mol_type = other RNA
ctggggcttgactcttaccc

SEQ ID NO: 16420 - RNA, 20 nt, synthetic construct
  source 1..20: mol_type = other RNA
ctggggttgttgtcattgct

SEQ ID NO: 16421 - RNA, 20 nt, synthetic construct
  source 1..20: mol_type = other RNA
ctgggtaagagtcaagcccc

SEQ ID NO: 16422 - RNA, 20 nt, synthetic construct
  source 1..20: mol_type = other RNA
ctgggtcccatgcggcccgc

SEQ ID NO: 16423 - RNA, 20 nt, synthetic construct
  source 1..20: mol_type = other RNA
ctgggttcatttgtatcaca

SEQ ID NO: 16424 - RNA, 20 nt, synthetic construct
  source 1..20: mol_type = other RNA
ctggtaagaacagaaatgag

SEQ ID NO: 16425 - RNA, 20 nt, synthetic construct
  source 1..20: mol_type = other RNA
ctggtagggatgcaaagggg

SEQ ID NO: 16426 - RNA, 20 nt, synthetic construct
  source 1..20: mol_type = other RNA
ctggtatgactaaagaactg

SEQ ID NO: 16427 - RNA, 20 nt, synthetic construct
  source 1..20: mol_type = other RNA
ctggtgtctcgcgaaaccag

SEQ ID NO: 16428 - RNA, 20 nt, synthetic construct
  source 1..20: mol_type = other RNA
ctggtttacaggatgaattc

SEQ ID NO: 16429 - RNA, 20 nt, synthetic construct
  source 1..20: mol_type = other RNA
ctggtttcgcgagacaccag

SEQ ID NO: 16430 - RNA, 20 nt, synthetic construct
  source 1..20: mol_type = other RNA
ctggtttctcaagcaaaagc

SEQ ID NO: 16431 - RNA, 20 nt, synthetic construct
  source 1..20: mol_type = other RNA
ctgtaaacagtacaagccag

SEQ ID NO: 16432 - RNA, 20 nt, synthetic construct
  source 1..20: mol_type = other RNA
ctgtaaaccaggggtgtcca

SEQ ID NO: 16433 - RNA, 20 nt, synthetic construct
  source 1..20: mol_type = other RNA
ctgtaaagcagtagtcaaga

SEQ ID NO: 16434 - RNA, 20 nt, synthetic construct
  source 1..20: mol_type = other RNA
ctgtaacagtttaatggaat

SEQ ID NO: 16435 - RNA, 20 nt, synthetic construct
  source 1..20: mol_type = other RNA
ctgtaatccacagaacaagt

SEQ ID NO: 16436 - RNA, 20 nt, synthetic construct
  source 1..20: mol_type = other RNA
ctgtagccccggacttgttc

SEQ ID NO: 16437 - RNA, 20 nt, synthetic construct
  source 1..20: mol_type = other RNA
ctgtattagcaatataaaaa

SEQ ID NO: 16438 - RNA, 20 nt, synthetic construct
  source 1..20: mol_type = other RNA
ctgtcattttcatgctctat

SEQ ID NO: 16439 - RNA, 20 nt, synthetic construct
  source 1..20: mol_type = other RNA
ctgtccacagttgcaattca

SEQ ID NO: 16440 - RNA, 20 nt, synthetic construct
  source 1..20: mol_type = other RNA
ctgtccctgaccgtcttcac

SEQ ID NO: 16441 - RNA, 20 nt, synthetic construct
  source 1..20: mol_type = other RNA
ctgtcctacaagttttcact

SEQ ID NO: 16442 - RNA, 20 nt, synthetic construct
  source 1..20: mol_type = other RNA
ctgtcctgggtcccatgcgg

SEQ ID NO: 16443 - RNA, 20 nt, synthetic construct
  source 1..20: mol_type = other RNA
ctgtcctttatatgtggccc

SEQ ID NO: 16444 - RNA, 20 nt, synthetic construct
  source 1..20: mol_type = other RNA
ctgtctctagaaaaatgctc

SEQ ID NO: 16445 - RNA, 20 nt, synthetic construct
  source 1..20: mol_type = other RNA
ctgtctctgtctttagtgtt

SEQ ID NO: 16446 - RNA, 20 nt, synthetic construct
  source 1..20: mol_type = other RNA
ctgtctggtttcgcgagaca

SEQ ID NO: 16447 - RNA, 20 nt, synthetic construct
  source 1..20: mol_type = other RNA
ctgtcttgggccacatataa

SEQ ID NO: 16448 - RNA, 20 nt, synthetic construct
  source 1..20: mol_type = other RNA
ctgtctttagtgttatcttt

SEQ ID NO: 16449 - RNA, 20 nt, synthetic construct
  source 1..20: mol_type = other RNA
ctgtgaagacggtcagggac

SEQ ID NO: 16450 - RNA, 20 nt, synthetic construct
  source 1..20: mol_type = other RNA
ctgtggacagtatagctgta

SEQ ID NO: 16451 - RNA, 20 nt, synthetic construct
  source 1..20: mol_type = other RNA
ctgtggattacagaatacgt

SEQ ID NO: 16452 - RNA, 20 nt, synthetic construct
  source 1..20: mol_type = other RNA
ctgtgtgatacaaatgaacc

SEQ ID NO: 16453 - RNA, 20 nt, synthetic construct
  source 1..20: mol_type = other RNA
ctgtgtgatagcttccaaat

SEQ ID NO: 16454 - RNA, 20 nt, synthetic construct
  source 1..20: mol_type = other RNA
ctgttaaattgaggaaagtc

SEQ ID NO: 16455 - RNA, 20 nt, synthetic construct
  source 1..20: mol_type = other RNA
ctgttacaggagctacatag

SEQ ID NO: 16456 - RNA, 20 nt, synthetic construct
  source 1..20: mol_type = other RNA
ctgttctcgtgaatgtgatg

SEQ ID NO: 16457 - RNA, 20 nt, synthetic construct
  source 1..20: mol_type = other RNA
ctgttcttaccagttagtaa

SEQ ID NO: 16458 - RNA, 20 nt, synthetic construct
  source 1..20: mol_type = other RNA
ctgttgtccaaggcaggcac

SEQ ID NO: 16459 - RNA, 20 nt, synthetic construct
  source 1..20: mol_type = other RNA
ctgttgttctatgacccaaa

SEQ ID NO: 16460 - RNA, 20 nt, synthetic construct
  source 1..20: mol_type = other RNA
ctgtttacagcaagttgtct

SEQ ID NO: 16461 - RNA, 20 nt, synthetic construct
  source 1..20: mol_type = other RNA
cttaaagttggctagacatc

SEQ ID NO: 16462 - RNA, 20 nt, synthetic construct
  source 1..20: mol_type = other RNA
cttaactattctgagctttt

SEQ ID NO: 16463 - RNA, 20 nt, synthetic construct
  source 1..20: mol_type = other RNA
cttaatttgtggtggaacca

SEQ ID NO: 16464 - RNA, 20 nt, synthetic construct
  source 1..20: mol_type = other RNA
cttacatcttgttaggatga

SEQ ID NO: 16465 - RNA, 20 nt, synthetic construct
  source 1..20: mol_type = other RNA
cttaccagttagtaactgat

SEQ ID NO: 16466 - RNA, 20 nt, synthetic construct
  source 1..20: mol_type = other RNA
cttacccagcagtgctttta

SEQ ID NO: 16467 - RNA, 20 nt, synthetic construct
  source 1..20: mol_type = other RNA
cttactgctcagtaaaaaga

SEQ ID NO: 16468 - RNA, 20 nt, synthetic construct
  source 1..20: mol_type = other RNA
cttactttgtgattgttttc

SEQ ID NO: 16469 - RNA, 20 nt, synthetic construct
  source 1..20: mol_type = other RNA
cttagagctcctccaatcaa

SEQ ID NO: 16470 - RNA, 20 nt, synthetic construct
  source 1..20: mol_type = other RNA
cttagcaactctcactcata

SEQ ID NO: 16471 - RNA, 20 nt, synthetic construct
  source 1..20: mol_type = other RNA
cttagctgggattctgtccc

SEQ ID NO: 16472 - RNA, 20 nt, synthetic construct
  source 1..20: mol_type = other RNA
cttatcatttttggagcatt

SEQ ID NO: 16473 - RNA, 20 nt, synthetic construct
  source 1..20: mol_type = other RNA
cttatgcatcacattcacga

SEQ ID NO: 16474 - RNA, 20 nt, synthetic construct
  source 1..20: mol_type = other RNA
cttcaaaaagctcagaatag

SEQ ID NO: 16475 - RNA, 20 nt, synthetic construct
  source 1..20: mol_type = other RNA
cttcacagtccaggtgatct

SEQ ID NO: 16476 - RNA, 20 nt, synthetic construct
  source 1..20: mol_type = other RNA
cttcagcttttatttcctta

SEQ ID NO: 16477 - RNA, 20 nt, synthetic construct
  source 1..20: mol_type = other RNA
cttcaggagagaggtcatat

SEQ ID NO: 16478 - RNA, 20 nt, synthetic construct
  source 1..20: mol_type = other RNA
cttcattcaagttctgatat

SEQ ID NO: 16479 - RNA, 20 nt, synthetic construct
  source 1..20: mol_type = other RNA
cttccaaattgctgtctctg

SEQ ID NO: 16480 - RNA, 20 nt, synthetic construct
  source 1..20: mol_type = other RNA
cttccatggtctgttgttct

SEQ ID NO: 16481 - RNA, 20 nt, synthetic construct
  source 1..20: mol_type = other RNA
cttccctccctcaccctctc

SEQ ID NO: 16482 - RNA, 20 nt, synthetic construct
  source 1..20: mol_type = other RNA
cttccctgggccacactgca

SEQ ID NO: 16483 - RNA, 20 nt, synthetic construct
  source 1..20: mol_type = other RNA
cttcctctaaatacctctca

SEQ ID NO: 16484 - RNA, 20 nt, synthetic construct
  source 1..20: mol_type = other RNA
cttcctggaaacacttgatt

SEQ ID NO: 16485 - RNA, 20 nt, synthetic construct
  source 1..20: mol_type = other RNA
cttcctttaggacaatcatc

SEQ ID NO: 16486 - RNA, 20 nt, synthetic construct
  source 1..20: mol_type = other RNA
cttctgactcctgagcagtt

SEQ ID NO: 16487 - RNA, 20 nt, synthetic construct
  source 1..20: mol_type = other RNA
cttgaatgaagaataggtct

SEQ ID NO: 16488 - RNA, 20 nt, synthetic construct
  source 1..20: mol_type = other RNA
cttgactactgctttacaga

SEQ ID NO: 16489 - RNA, 20 nt, synthetic construct
  source 1..20: mol_type = other RNA
cttgactcttacccagcagt

SEQ ID NO: 16490 - RNA, 20 nt, synthetic construct
  source 1..20: mol_type = other RNA
cttgagaaaccagtgcttcc

SEQ ID NO: 16491 - RNA, 20 nt, synthetic construct
  source 1..20: mol_type = other RNA
cttgagcattggaaaagtgg

SEQ ID NO: 16492 - RNA, 20 nt, synthetic construct
  source 1..20: mol_type = other RNA
cttgagctggggcttgactc

SEQ ID NO: 16493 - RNA, 20 nt, synthetic construct
  source 1..20: mol_type = other RNA
cttgagttatagaaaacaat

SEQ ID NO: 16494 - RNA, 20 nt, synthetic construct
  source 1..20: mol_type = other RNA
cttgatcccattttccattt

SEQ ID NO: 16495 - RNA, 20 nt, synthetic construct
  source 1..20: mol_type = other RNA
cttgatcttgggtagcctgg

SEQ ID NO: 16496 - RNA, 20 nt, synthetic construct
  source 1..20: mol_type = other RNA
cttgattggaggagctctaa

SEQ ID NO: 16497 - RNA, 20 nt, synthetic construct
  source 1..20: mol_type = other RNA
cttgattttcattttatcct

SEQ ID NO: 16498 - RNA, 20 nt, synthetic construct
  source 1..20: mol_type = other RNA
cttgcagtgtggcccaggga

SEQ ID NO: 16499 - RNA, 20 nt, synthetic construct
  source 1..20: mol_type = other RNA
cttgctcctctagtattcag

SEQ ID NO: 16500 - RNA, 20 nt, synthetic construct
  source 1..20: mol_type = other RNA
cttgctgcaccaccaaagtg

SEQ ID NO: 16501 - RNA, 20 nt, synthetic construct
  source 1..20: mol_type = other RNA
cttgctgcttttaatcctgc

SEQ ID NO: 16502 - RNA, 20 nt, synthetic construct
  source 1..20: mol_type = other RNA
cttgctgtaaacagtacaag

SEQ ID NO: 16503 - RNA, 20 nt, synthetic construct
  source 1..20: mol_type = other RNA
cttgctttcactgttgtcca

SEQ ID NO: 16504 - RNA, 20 nt, synthetic construct
  source 1..20: mol_type = other RNA
cttggacaacagtgaaagca

SEQ ID NO: 16505 - RNA, 20 nt, synthetic construct
  source 1..20: mol_type = other RNA
cttgggccacatataaagga

SEQ ID NO: 16506 - RNA, 20 nt, synthetic construct
  source 1..20: mol_type = other RNA
cttgggtagcctggtgtctc

SEQ ID NO: 16507 - RNA, 20 nt, synthetic construct
  source 1..20: mol_type = other RNA
cttgtactcctgagctccta

SEQ ID NO: 16508 - RNA, 20 nt, synthetic construct
  source 1..20: mol_type = other RNA
cttgtactgtttacagcaag

SEQ ID NO: 16509 - RNA, 20 nt, synthetic construct
  source 1..20: mol_type = other RNA
cttgtaggacagaaatttag

SEQ ID NO: 16510 - RNA, 20 nt, synthetic construct
  source 1..20: mol_type = other RNA
cttgttaggatgattgtcct

SEQ ID NO: 16511 - RNA, 20 nt, synthetic construct
  source 1..20: mol_type = other RNA
cttgttctgtggattacaga

SEQ ID NO: 16512 - RNA, 20 nt, synthetic construct
  source 1..20: mol_type = other RNA
ctttaaaaatggtttgttgg

SEQ ID NO: 16513 - RNA, 20 nt, synthetic construct
  source 1..20: mol_type = other RNA
ctttaagtaaatggagtgag

SEQ ID NO: 16514 - RNA, 20 nt, synthetic construct
  source 1..20: mol_type = other RNA
ctttacagagaattggatct

SEQ ID NO: 16515 - RNA, 20 nt, synthetic construct
  source 1..20: mol_type = other RNA
ctttaggacaatcatcctaa

SEQ ID NO: 16516 - RNA, 20 nt, synthetic construct
  source 1..20: mol_type = other RNA
ctttagtcataccagccact

SEQ ID NO: 16517 - RNA, 20 nt, synthetic construct
  source 1..20: mol_type = other RNA
ctttagtgttatcttttgat

SEQ ID NO: 16518 - RNA, 20 nt, synthetic construct
  source 1..20: mol_type = other RNA
ctttatatgtggcccaagac

SEQ ID NO: 16519 - RNA, 20 nt, synthetic construct
  source 1..20: mol_type = other RNA
ctttatgtctgtctctagaa

SEQ ID NO: 16520 - RNA, 20 nt, synthetic construct
  source 1..20: mol_type = other RNA
ctttcactgttgtccaaggc

SEQ ID NO: 16521 - RNA, 20 nt, synthetic construct
  source 1..20: mol_type = other RNA
ctttcctcaatttaacagct

SEQ ID NO: 16522 - RNA, 20 nt, synthetic construct
  source 1..20: mol_type = other RNA
ctttcggcttccctgggcca

SEQ ID NO: 16523 - RNA, 20 nt, synthetic construct
  source 1..20: mol_type = other RNA
ctttctccctctcttgatct

SEQ ID NO: 16524 - RNA, 20 nt, synthetic construct
  source 1..20: mol_type = other RNA
ctttgcatccctaccaggca

SEQ ID NO: 16525 - RNA, 20 nt, synthetic construct
  source 1..20: mol_type = other RNA
ctttggtcatgccttccatg

SEQ ID NO: 16526 - RNA, 20 nt, synthetic construct
  source 1..20: mol_type = other RNA
ctttggtggtgcagcaaggg

SEQ ID NO: 16527 - RNA, 20 nt, synthetic construct
  source 1..20: mol_type = other RNA
ctttgtgattgttttctata

SEQ ID NO: 16528 - RNA, 20 nt, synthetic construct
  source 1..20: mol_type = other RNA
ctttgtggggtggttctttt

SEQ ID NO: 16529 - RNA, 20 nt, synthetic construct
  source 1..20: mol_type = other RNA
cttttaaaaaagcagttttc

SEQ ID NO: 16530 - RNA, 20 nt, synthetic construct
  source 1..20: mol_type = other RNA
cttttaatcctgcagattca

SEQ ID NO: 16531 - RNA, 20 nt, synthetic construct
  source 1..20: mol_type = other RNA
cttttattcctccctagttc

SEQ ID NO: 16532 - RNA, 20 nt, synthetic construct
  source 1..20: mol_type = other RNA
cttttatttccttactgctc

SEQ ID NO: 16533 - RNA, 20 nt, synthetic construct
  source 1..20: mol_type = other RNA
cttttccaatgctcaagatt

SEQ ID NO: 16534 - RNA, 20 nt, synthetic construct
  source 1..20: mol_type = other RNA
cttttgatccatcttacatc

SEQ ID NO: 16535 - RNA, 20 nt, synthetic construct
  source 1..20: mol_type = other RNA
cttttgcttgagaaaccagt

SEQ ID NO: 16536 - RNA, 20 nt, synthetic construct
  source 1..20: mol_type = other RNA
ctttttactgagcagtaagg

SEQ ID NO: 16537 - RNA, 20 nt, synthetic construct
  source 1..20: mol_type = other RNA
ctttttcatttttcactatt

SEQ ID NO: 16538 - RNA, 20 nt, synthetic construct
  source 1..20: mol_type = other RNA
ctttttccttagctgggatt

SEQ ID NO: 16539 - RNA, 20 nt, synthetic construct
  source 1..20: mol_type = other RNA
ctttttcttcctctaaatac

SEQ ID NO: 16540 - RNA, 20 nt, synthetic construct
  source 1..20: mol_type = other RNA
ctttttgaaggaatagtgtc

SEQ ID NO: 16541 - RNA, 20 nt, synthetic construct
  source 1..20: mol_type = other RNA
ctttttggaatgctaccctt

SEQ ID NO: 16542 - RNA, 20 nt, synthetic construct
  source 1..20: mol_type = other RNA
cttttttaaaagggcagttt

SEQ ID NO: 16543 - RNA, 20 nt, synthetic construct
  source 1..20: mol_type = other RNA
gaaaaagctgttaaattgag

SEQ ID NO: 16544 - RNA, 20 nt, synthetic construct
  source 1..20: mol_type = other RNA
gaaaaagggagatgttgcct

SEQ ID NO: 16545 - RNA, 20 nt, synthetic construct
  source 1..20: mol_type = other RNA
gaaaaatgaaaaagctgtta

SEQ ID NO: 16546 - RNA, 20 nt, synthetic construct
  source 1..20: mol_type = other RNA
gaaaaatgctccaaaaatga

SEQ ID NO: 16547 - RNA, 20 nt, synthetic construct
  source 1..20: mol_type = other RNA
gaaaaattttagcttttgct

SEQ ID NO: 16548 - RNA, 20 nt, synthetic construct
  source 1..20: mol_type = other RNA
gaaaacaatcacaaagtaag

SEQ ID NO: 16549 - RNA, 20 nt, synthetic construct
  source 1..20: mol_type = other RNA
gaaaaccatcaatgtccacg

SEQ ID NO: 16550 - RNA, 20 nt, synthetic construct
  source 1..20: mol_type = other RNA
gaaaactgcttttttaaaag

SEQ ID NO: 16551 - RNA, 20 nt, synthetic construct
  source 1..20: mol_type = other RNA
gaaaacttgtaggacagaaa

SEQ ID NO: 16552 - RNA, 20 nt, synthetic construct
  source 1..20: mol_type = other RNA
gaaaagtggctggtatgact

SEQ ID NO: 16553 - RNA, 20 nt, synthetic construct
  source 1..20: mol_type = other RNA
gaaaatagtgaaaaatgaaa

SEQ ID NO: 16554 - RNA, 20 nt, synthetic construct
  source 1..20: mol_type = other RNA
gaaaatcaagataaacattt

SEQ ID NO: 16555 - RNA, 20 nt, synthetic construct
  source 1..20: mol_type = other RNA
gaaaatgacaggtgaaactc

SEQ ID NO: 16556 - RNA, 20 nt, synthetic construct
  source 1..20: mol_type = other RNA
gaaaatgggatcaagtatga

SEQ ID NO: 16557 - RNA, 20 nt, synthetic construct
  source 1..20: mol_type = other RNA
gaaacacttgattggaggag

SEQ ID NO: 16558 - RNA, 20 nt, synthetic construct
  source 1..20: mol_type = other RNA
gaaaccagacagattggttc

SEQ ID NO: 16559 - RNA, 20 nt, synthetic construct
  source 1..20: mol_type = other RNA
gaaaccagtgcttccctccc

SEQ ID NO: 16560 - RNA, 20 nt, synthetic construct
  source 1..20: mol_type = other RNA
gaaactccattactggcttg

SEQ ID NO: 16561 - RNA, 20 nt, synthetic construct
  source 1..20: mol_type = other RNA
gaaagattggacacccctgg

SEQ ID NO: 16562 - RNA, 20 nt, synthetic construct
  source 1..20: mol_type = other RNA
gaaagcaagcgttaatgagt

SEQ ID NO: 16563 - RNA, 20 nt, synthetic construct
  source 1..20: mol_type = other RNA
gaaagctaagtccaacaaac

SEQ ID NO: 16564 - RNA, 20 nt, synthetic construct
  source 1..20: mol_type = other RNA
gaaagctagtgctatgtctg

SEQ ID NO: 16565 - RNA, 20 nt, synthetic construct
  source 1..20: mol_type = other RNA
gaaagtctatccagggacct

SEQ ID NO: 16566 - RNA, 20 nt, synthetic construct
  source 1..20: mol_type = other RNA
gaaataaaagctgaagctct

SEQ ID NO: 16567 - RNA, 20 nt, synthetic construct
  source 1..20: mol_type = other RNA
gaaatccaaactcattaacg

SEQ ID NO: 16568 - RNA, 20 nt, synthetic construct
  source 1..20: mol_type = other RNA
gaaatgagaggtatttagag

SEQ ID NO: 16569 - RNA, 20 nt, synthetic construct
  source 1..20: mol_type = other RNA
gaaatgtaatgggccagaga

SEQ ID NO: 16570 - RNA, 20 nt, synthetic construct
  source 1..20: mol_type = other RNA
gaaatttaggctgggttcat

SEQ ID NO: 16571 - RNA, 20 nt, synthetic construct
  source 1..20: mol_type = other RNA
gaacaacagaccatggaagg

SEQ ID NO: 16572 - RNA, 20 nt, synthetic construct
  source 1..20: mol_type = other RNA
gaacaagtccggggctacag

SEQ ID NO: 16573 - RNA, 20 nt, synthetic construct
  source 1..20: mol_type = other RNA
gaacagaaatgagaggtatt

SEQ ID NO: 16574 - RNA, 20 nt, synthetic construct
  source 1..20: mol_type = other RNA
gaacagaattcatcctgtaa

SEQ ID NO: 16575 - RNA, 20 nt, synthetic construct
  source 1..20: mol_type = other RNA
gaaccaatctgtctggtttc

SEQ ID NO: 16576 - RNA, 20 nt, synthetic construct
  source 1..20: mol_type = other RNA
gaaccaccccacaaagatat

SEQ ID NO: 16577 - RNA, 20 nt, synthetic construct
  source 1..20: mol_type = other RNA
gaacccagcctaaatttctg

SEQ ID NO: 16578 - RNA, 20 nt, synthetic construct
  source 1..20: mol_type = other RNA
gaacgtgaactagggaggaa

SEQ ID NO: 16579 - RNA, 20 nt, synthetic construct
  source 1..20: mol_type = other RNA
gaactagggaggaataaaag

SEQ ID NO: 16580 - RNA, 20 nt, synthetic construct
  source 1..20: mol_type = other RNA
gaactgtcttgggccacata

SEQ ID NO: 16581 - RNA, 20 nt, synthetic construct
  source 1..20: mol_type = other RNA
gaacttgaatgaagaatagg

SEQ ID NO: 16582 - RNA, 20 nt, synthetic construct
  source 1..20: mol_type = other RNA
gaagaaaaagggagatgttg

SEQ ID NO: 16583 - RNA, 20 nt, synthetic construct
  source 1..20: mol_type = other RNA
gaagaaaactgcttttttaa

SEQ ID NO: 16584 - RNA, 20 nt, synthetic construct
  source 1..20: mol_type = other RNA
gaagaataggtctgtgtgat

SEQ ID NO: 16585 - RNA, 20 nt, synthetic construct
  source 1..20: mol_type = other RNA
gaagacggtcagggacagaa

SEQ ID NO: 16586 - RNA, 20 nt, synthetic construct
  source 1..20: mol_type = other RNA
gaagatagagcatgaaaatg

SEQ ID NO: 16587 - RNA, 20 nt, synthetic construct
  source 1..20: mol_type = other RNA
gaagcactggtttctcaagc

SEQ ID NO: 16588 - RNA, 20 nt, synthetic construct
  source 1..20: mol_type = other RNA
gaagccgaaagattggacac

SEQ ID NO: 16589 - RNA, 20 nt, synthetic construct
  source 1..20: mol_type = other RNA
gaagctatcacacaggcatc

SEQ ID NO: 16590 - RNA, 20 nt, synthetic construct
  source 1..20: mol_type = other RNA
gaagctctctggcccattac

SEQ ID NO: 16591 - RNA, 20 nt, synthetic construct
  source 1..20: mol_type = other RNA
gaaggaatagtgtcttgtac

SEQ ID NO: 16592 - RNA, 20 nt, synthetic construct
  source 1..20: mol_type = other RNA
gaaggcatgaccaaagggga

SEQ ID NO: 16593 - RNA, 20 nt, synthetic construct
  source 1..20: mol_type = other RNA
gaagtcacatggaatgaatt

SEQ ID NO: 16594 - RNA, 20 nt, synthetic construct
  source 1..20: mol_type = other RNA
gaagtgaaaacttgtaggac

SEQ ID NO: 16595 - RNA, 20 nt, synthetic construct
  source 1..20: mol_type = other RNA
gaataaaagcactgctgggt

SEQ ID NO: 16596 - RNA, 20 nt, synthetic construct
  source 1..20: mol_type = other RNA
gaatacgtggacattgatgg

SEQ ID NO: 16597 - RNA, 20 nt, synthetic construct
  source 1..20: mol_type = other RNA
gaatactagaggagcaagta

SEQ ID NO: 16598 - RNA, 20 nt, synthetic construct
  source 1..20: mol_type = other RNA
gaataggtctgtgtgataca

SEQ ID NO: 16599 - RNA, 20 nt, synthetic construct
  source 1..20: mol_type = other RNA
gaatagtgtcttgtactcct

SEQ ID NO: 16600 - RNA, 20 nt, synthetic construct
  source 1..20: mol_type = other RNA
gaatagttaaggtaatttaa

SEQ ID NO: 16601 - RNA, 20 nt, synthetic construct
  source 1..20: mol_type = other RNA
gaatcccagctaaggaaaaa

SEQ ID NO: 16602 - RNA, 20 nt, synthetic construct
  source 1..20: mol_type = other RNA
gaatctcacctccctaaaat

SEQ ID NO: 16603 - RNA, 20 nt, synthetic construct
  source 1..20: mol_type = other RNA
gaatctgcaggattaaaagc

SEQ ID NO: 16604 - RNA, 20 nt, synthetic construct
  source 1..20: mol_type = other RNA
gaatgaagaataggtctgtg

SEQ ID NO: 16605 - RNA, 20 nt, synthetic construct
  source 1..20: mol_type = other RNA
gaatgaattgcagttaccca

SEQ ID NO: 16606 - RNA, 20 nt, synthetic construct
  source 1..20: mol_type = other RNA
gaatgctacccttgctgctt

SEQ ID NO: 16607 - RNA, 20 nt, synthetic construct
  source 1..20: mol_type = other RNA
gaatgtgatgcataaggtcc

SEQ ID NO: 16608 - RNA, 20 nt, synthetic construct
  source 1..20: mol_type = other RNA
gaattactatgacccacgca

SEQ ID NO: 16609 - RNA, 20 nt, synthetic construct
  source 1..20: mol_type = other RNA
gaattataataccaacattt

SEQ ID NO: 16610 - RNA, 20 nt, synthetic construct
  source 1..20: mol_type = other RNA
gaattcatcctgtaaaccag

SEQ ID NO: 16611 - RNA, 20 nt, synthetic construct
  source 1..20: mol_type = other RNA
gaattctgttctcgtgaatg

SEQ ID NO: 16612 - RNA, 20 nt, synthetic construct
  source 1..20: mol_type = other RNA
gaattgcaactgtggacagt

SEQ ID NO: 16613 - RNA, 20 nt, synthetic construct
  source 1..20: mol_type = other RNA
gaattgcagttacccaaatc

SEQ ID NO: 16614 - RNA, 20 nt, synthetic construct
  source 1..20: mol_type = other RNA
gaattggatctgaggttagg

SEQ ID NO: 16615 - RNA, 20 nt, synthetic construct
  source 1..20: mol_type = other RNA
gaattttagggaggtgagat

SEQ ID NO: 16616 - RNA, 20 nt, synthetic construct
  source 1..20: mol_type = other RNA
gacaacaaccccagaattac

SEQ ID NO: 16617 - RNA, 20 nt, synthetic construct
  source 1..20: mol_type = other RNA
gacaacagtgaaagcaagcg

SEQ ID NO: 16618 - RNA, 20 nt, synthetic construct
  source 1..20: mol_type = other RNA
gacaacttgctgtaaacagt

SEQ ID NO: 16619 - RNA, 20 nt, synthetic construct
  source 1..20: mol_type = other RNA
gacaatcatcctaacaagat

SEQ ID NO: 16620 - RNA, 20 nt, synthetic construct
  source 1..20: mol_type = other RNA
gacaccaggctacccaagat

SEQ ID NO: 16621 - RNA, 20 nt, synthetic construct
  source 1..20: mol_type = other RNA
gacacccctggtttacagga

SEQ ID NO: 16622 - RNA, 20 nt, synthetic construct
  source 1..20: mol_type = other RNA
gacactattccttcaaaaag

SEQ ID NO: 16623 - RNA, 20 nt, synthetic construct
  source 1..20: mol_type = other RNA
gacagaaatttaggctgggt

SEQ ID NO: 16624 - RNA, 20 nt, synthetic construct
  source 1..20: mol_type = other RNA
gacagaatcccagctaagga

SEQ ID NO: 16625 - RNA, 20 nt, synthetic construct
  source 1..20: mol_type = other RNA
gacagacataaagcatgatc

SEQ ID NO: 16626 - RNA, 20 nt, synthetic construct
  source 1..20: mol_type = other RNA
gacagagacagcaatttgga

SEQ ID NO: 16627 - RNA, 20 nt, synthetic construct
  source 1..20: mol_type = other RNA
gacagattggttccaccaca

SEQ ID NO: 16628 - RNA, 20 nt, synthetic construct
  source 1..20: mol_type = other RNA
gacagcaatttggaagctat

SEQ ID NO: 16629 - RNA, 20 nt, synthetic construct
  source 1..20: mol_type = other RNA
gacaggtgaaactccattac

SEQ ID NO: 16630 - RNA, 20 nt, synthetic construct
  source 1..20: mol_type = other RNA
gacagtatagctgtagcccc

SEQ ID NO: 16631 - RNA, 20 nt, synthetic construct
  source 1..20: mol_type = other RNA
gacagttcttgcagtgtggc

SEQ ID NO: 16632 - RNA, 20 nt, synthetic construct
  source 1..20: mol_type = other RNA
gacataaagcatgatcacct

SEQ ID NO: 16633 - RNA, 20 nt, synthetic construct
  source 1..20: mol_type = other RNA
gacatagcactagctttctc

SEQ ID NO: 16634 - RNA, 20 nt, synthetic construct
  source 1..20: mol_type = other RNA
gacatcagagtatactagga

SEQ ID NO: 16635 - RNA, 20 nt, synthetic construct
  source 1..20: mol_type = other RNA
gacatgtaaatgtctttatg

SEQ ID NO: 16636 - RNA, 20 nt, synthetic construct
  source 1..20: mol_type = other RNA
gacattgatggttttctctt

SEQ ID NO: 16637 - RNA, 20 nt, synthetic construct
  source 1..20: mol_type = other RNA
gacatttacatgtcgctcac

SEQ ID NO: 16638 - RNA, 20 nt, synthetic construct
  source 1..20: mol_type = other RNA
gacatttgaatctgcaggat

SEQ ID NO: 16639 - RNA, 20 nt, synthetic construct
  source 1..20: mol_type = other RNA
gacattttattaatcttgag

SEQ ID NO: 16640 - RNA, 20 nt, synthetic construct
  source 1..20: mol_type = other RNA
gaccaaaggggagatgacat

SEQ ID NO: 16641 - RNA, 20 nt, synthetic construct
  source 1..20: mol_type = other RNA
gaccatggaaggcatgacca

SEQ ID NO: 16642 - RNA, 20 nt, synthetic construct
  source 1..20: mol_type = other RNA
gacccaaactgcccttttaa

SEQ ID NO: 16643 - RNA, 20 nt, synthetic construct
  source 1..20: mol_type = other RNA
gacccacgcagtacaaactg

SEQ ID NO: 16644 - RNA, 20 nt, synthetic construct
  source 1..20: mol_type = other RNA
gacccaggacagctttgaat

SEQ ID NO: 16645 - RNA, 20 nt, synthetic construct
  source 1..20: mol_type = other RNA
gacccttgctgcaccaccaa

SEQ ID NO: 16646 - RNA, 20 nt, synthetic construct
  source 1..20: mol_type = other RNA
gaccgtcttcacagtccagg

SEQ ID NO: 16647 - RNA, 20 nt, synthetic construct
  source 1..20: mol_type = other RNA
gacctattcttcattcaagt

SEQ ID NO: 16648 - RNA, 20 nt, synthetic construct
  source 1..20: mol_type = other RNA
gacctctctcctgaagtcac

SEQ ID NO: 16649 - RNA, 20 nt, synthetic construct
  source 1..20: mol_type = other RNA
gaccttatgcatcacattca

SEQ ID NO: 16650 - RNA, 20 nt, synthetic construct
  source 1..20: mol_type = other RNA
gacggtcagggacagaatcc

SEQ ID NO: 16651 - RNA, 20 nt, synthetic construct
  source 1..20: mol_type = other RNA
gacgtcatatatctttgtgg

SEQ ID NO: 16652 - RNA, 20 nt, synthetic construct
  source 1..20: mol_type = other RNA
gacgtctctatgatttgggt

SEQ ID NO: 16653 - RNA, 20 nt, synthetic construct
  source 1..20: mol_type = other RNA
gactactgctttacagagaa

SEQ ID NO: 16654 - RNA, 20 nt, synthetic construct
  source 1..20: mol_type = other RNA
gactcctgagcagtttgtac

SEQ ID NO: 16655 - RNA, 20 nt, synthetic construct
  source 1..20: mol_type = other RNA
gactcttacccagcagtgct

SEQ ID NO: 16656 - RNA, 20 nt, synthetic construct
  source 1..20: mol_type = other RNA
gactgcggattatcactact

SEQ ID NO: 16657 - RNA, 20 nt, synthetic construct
  source 1..20: mol_type = other RNA
gactgtgaagacggtcaggg

SEQ ID NO: 16658 - RNA, 20 nt, synthetic construct
  source 1..20: mol_type = other RNA
gacttagctttcagctaaat

SEQ ID NO: 16659 - RNA, 20 nt, synthetic construct
  source 1..20: mol_type = other RNA
gacttcaggagagaggtcat

SEQ ID NO: 16660 - RNA, 20 nt, synthetic construct
  source 1..20: mol_type = other RNA
gacttgttctgtggattaca

SEQ ID NO: 16661 - RNA, 20 nt, synthetic construct
  source 1..20: mol_type = other RNA
gactttcctcaatttaacag

SEQ ID NO: 16662 - RNA, 20 nt, synthetic construct
  source 1..20: mol_type = other RNA
gagaaaaccatcaatgtcca

SEQ ID NO: 16663 - RNA, 20 nt, synthetic construct
  source 1..20: mol_type = other RNA
gagaaaccagtgcttccctc

SEQ ID NO: 16664 - RNA, 20 nt, synthetic construct
  source 1..20: mol_type = other RNA
gagaaagctagtgctatgtc

SEQ ID NO: 16665 - RNA, 20 nt, synthetic construct
  source 1..20: mol_type = other RNA
gagaacagaattcatcctgt

SEQ ID NO: 16666 - RNA, 20 nt, synthetic construct
  source 1..20: mol_type = other RNA
gagaattggatctgaggtta

SEQ ID NO: 16667 - RNA, 20 nt, synthetic construct
  source 1..20: mol_type = other RNA
gagacaccaggctacccaag

SEQ ID NO: 16668 - RNA, 20 nt, synthetic construct
  source 1..20: mol_type = other RNA
gagacagacataaagcatga

SEQ ID NO: 16669 - RNA, 20 nt, synthetic construct
  source 1..20: mol_type = other RNA
gagacagcaatttggaagct

SEQ ID NO: 16670 - RNA, 20 nt, synthetic construct
  source 1..20: mol_type = other RNA
gagacccttgctgcaccacc

SEQ ID NO: 16671 - RNA, 20 nt, synthetic construct
  source 1..20: mol_type = other RNA
gagacgtcatatatctttgt

SEQ ID NO: 16672 - RNA, 20 nt, synthetic construct
  source 1..20: mol_type = other RNA
gagactgcggattatcacta

SEQ ID NO: 16673 - RNA, 20 nt, synthetic construct
  source 1..20: mol_type = other RNA
gagagagggtgagggaggga

SEQ ID NO: 16674 - RNA, 20 nt, synthetic construct
  source 1..20: mol_type = other RNA
gagagaggtcatatttgtgt

SEQ ID NO: 16675 - RNA, 20 nt, synthetic construct
  source 1..20: mol_type = other RNA
gagagcctggggagagaggg

SEQ ID NO: 16676 - RNA, 20 nt, synthetic construct
  source 1..20: mol_type = other RNA
gagagcttcagcttttattt

SEQ ID NO: 16677 - RNA, 20 nt, synthetic construct
  source 1..20: mol_type = other RNA
gagagggagaaagctagtgc

SEQ ID NO: 16678 - RNA, 20 nt, synthetic construct
  source 1..20: mol_type = other RNA
gagagggtgagggagggaag

SEQ ID NO: 16679 - RNA, 20 nt, synthetic construct
  source 1..20: mol_type = other RNA
gagaggtatttagaggaaga

SEQ ID NO: 16680 - RNA, 20 nt, synthetic construct
  source 1..20: mol_type = other RNA
gagaggtcatatttgtgtgt

SEQ ID NO: 16681 - RNA, 20 nt, synthetic construct
  source 1..20: mol_type = other RNA
gagagttgctaagatgcctg

SEQ ID NO: 16682 - RNA, 20 nt, synthetic construct
  source 1..20: mol_type = other RNA
gagatcagttactaactggt

SEQ ID NO: 16683 - RNA, 20 nt, synthetic construct
  source 1..20: mol_type = other RNA
gagatgacatttgaatctgc

SEQ ID NO: 16684 - RNA, 20 nt, synthetic construct
  source 1..20: mol_type = other RNA
gagatgttgcctaacctcag

SEQ ID NO: 16685 - RNA, 20 nt, synthetic construct
  source 1..20: mol_type = other RNA
gagattccattaaactgtta

SEQ ID NO: 16686 - RNA, 20 nt, synthetic construct
  source 1..20: mol_type = other RNA
gagcaagtacaacaaatgga

SEQ ID NO: 16687 - RNA, 20 nt, synthetic construct
  source 1..20: mol_type = other RNA
gagcagtaaggaaataaaag

SEQ ID NO: 16688 - RNA, 20 nt, synthetic construct
  source 1..20: mol_type = other RNA
gagcagtttgtactgcgtgg

SEQ ID NO: 16689 - RNA, 20 nt, synthetic construct
  source 1..20: mol_type = other RNA
gagcatgaaaatgacaggtg

SEQ ID NO: 16690 - RNA, 20 nt, synthetic construct
  source 1..20: mol_type = other RNA
gagcattggaaaagtggctg

SEQ ID NO: 16691 - RNA, 20 nt, synthetic construct
  source 1..20: mol_type = other RNA
gagcatttttctagagacag

SEQ ID NO: 16692 - RNA, 20 nt, synthetic construct
  source 1..20: mol_type = other RNA
gagcctggggagagagggtg

SEQ ID NO: 16693 - RNA, 20 nt, synthetic construct
  source 1..20: mol_type = other RNA
gagcgacatgtaaatgtctt

SEQ ID NO: 16694 - RNA, 20 nt, synthetic construct
  source 1..20: mol_type = other RNA
gagctacatagttaaatata

SEQ ID NO: 16695 - RNA, 20 nt, synthetic construct
  source 1..20: mol_type = other RNA
gagctcaggagtacaagaca

SEQ ID NO: 16696 - RNA, 20 nt, synthetic construct
  source 1..20: mol_type = other RNA
gagctcctagtatactctga

SEQ ID NO: 16697 - RNA, 20 nt, synthetic construct
  source 1..20: mol_type = other RNA
gagctcctccaatcaagtgt

SEQ ID NO: 16698 - RNA, 20 nt, synthetic construct
  source 1..20: mol_type = other RNA
gagctctaagcatcatatct

SEQ ID NO: 16699 - RNA, 20 nt, synthetic construct
  source 1..20: mol_type = other RNA
gagctggggcttgactctta

SEQ ID NO: 16700 - RNA, 20 nt, synthetic construct
  source 1..20: mol_type = other RNA
gagcttcagcttttatttcc

SEQ ID NO: 16701 - RNA, 20 nt, synthetic construct
  source 1..20: mol_type = other RNA
gagctttttgaaggaatagt

SEQ ID NO: 16702 - RNA, 20 nt, synthetic construct
  source 1..20: mol_type = other RNA
gaggaaagtctatccaggga

SEQ ID NO: 16703 - RNA, 20 nt, synthetic construct
  source 1..20: mol_type = other RNA
gaggaagaaaaagggagatg

SEQ ID NO: 16704 - RNA, 20 nt, synthetic construct
  source 1..20: mol_type = other RNA
gaggaataaaagcactgctg

SEQ ID NO: 16705 - RNA, 20 nt, synthetic construct
  source 1..20: mol_type = other RNA
gaggaattataataccaaca

SEQ ID NO: 16706 - RNA, 20 nt, synthetic construct
  source 1..20: mol_type = other RNA
gaggagcaagtacaacaaat

SEQ ID NO: 16707 - RNA, 20 nt, synthetic construct
  source 1..20: mol_type = other RNA
gaggagctctaagcatcata

SEQ ID NO: 16708 - RNA, 20 nt, synthetic construct
  source 1..20: mol_type = other RNA
gagggaagcactggtttctc

SEQ ID NO: 16709 - RNA, 20 nt, synthetic construct
  source 1..20: mol_type = other RNA
gagggagaaagctagtgcta

SEQ ID NO: 16710 - RNA, 20 nt, synthetic construct
  source 1..20: mol_type = other RNA
gagggagggaagcactggtt

SEQ ID NO: 16711 - RNA, 20 nt, synthetic construct
  source 1..20: mol_type = other RNA
gagggtgagggagggaagca

SEQ ID NO: 16712 - RNA, 20 nt, synthetic construct
  source 1..20: mol_type = other RNA
gaggtatttagaggaagaaa

SEQ ID NO: 16713 - RNA, 20 nt, synthetic construct
  source 1..20: mol_type = other RNA
gaggtcatatttgtgtgtgt

SEQ ID NO: 16714 - RNA, 20 nt, synthetic construct
  source 1..20: mol_type = other RNA
gaggtgagattccattaaac

SEQ ID NO: 16715 - RNA, 20 nt, synthetic construct
  source 1..20: mol_type = other RNA
gaggttaggcaacatctccc

SEQ ID NO: 16716 - RNA, 20 nt, synthetic construct
  source 1..20: mol_type = other RNA
gagtacaagacactattcct

SEQ ID NO: 16717 - RNA, 20 nt, synthetic construct
  source 1..20: mol_type = other RNA
gagtatactaggagctcagg

SEQ ID NO: 16718 - RNA, 20 nt, synthetic construct
  source 1..20: mol_type = other RNA
gagtcaagccccagctcaag

SEQ ID NO: 16719 - RNA, 20 nt, synthetic construct
  source 1..20: mol_type = other RNA
gagtcagaagaaaactgctt

SEQ ID NO: 16720 - RNA, 20 nt, synthetic construct
  source 1..20: mol_type = other RNA
gagtgagagttgctaagatg

SEQ ID NO: 16721 - RNA, 20 nt, synthetic construct
  source 1..20: mol_type = other RNA
gagtgagcgacatgtaaatg

SEQ ID NO: 16722 - RNA, 20 nt, synthetic construct
  source 1..20: mol_type = other RNA
gagttatagaaaacaatcac

SEQ ID NO: 16723 - RNA, 20 nt, synthetic construct
  source 1..20: mol_type = other RNA
gagttgctaagatgcctggt

SEQ ID NO: 16724 - RNA, 20 nt, synthetic construct
  source 1..20: mol_type = other RNA
gagtttcacctgtcattttc

SEQ ID NO: 16725 - RNA, 20 nt, synthetic construct
  source 1..20: mol_type = other RNA
gagttttataccatttgaga

SEQ ID NO: 16726 - RNA, 20 nt, synthetic construct
  source 1..20: mol_type = other RNA
gataaaacttactttgtgat

SEQ ID NO: 16727 - RNA, 20 nt, synthetic construct
  source 1..20: mol_type = other RNA
gataaacatttaagaacgtg

SEQ ID NO: 16728 - RNA, 20 nt, synthetic construct
  source 1..20: mol_type = other RNA
gataacactaaagacagaga

SEQ ID NO: 16729 - RNA, 20 nt, synthetic construct
  source 1..20: mol_type = other RNA
gataagtagtgataatccgc

SEQ ID NO: 16730 - RNA, 20 nt, synthetic construct
  source 1..20: mol_type = other RNA
gatacaaatgaacccagcct

SEQ ID NO: 16731 - RNA, 20 nt, synthetic construct
  source 1..20: mol_type = other RNA
gatactgtattagcaatata

SEQ ID NO: 16732 - RNA, 20 nt, synthetic construct
  source 1..20: mol_type = other RNA
gatagactttcctcaattta

SEQ ID NO: 16733 - RNA, 20 nt, synthetic construct
  source 1..20: mol_type = other RNA
gatagagcatgaaaatgaca

SEQ ID NO: 16734 - RNA, 20 nt, synthetic construct
  source 1..20: mol_type = other RNA
gatagcttccaaattgctgt

SEQ ID NO: 16735 - RNA, 20 nt, synthetic construct
  source 1..20: mol_type = other RNA
gatatatgacgtctctatga

SEQ ID NO: 16736 - RNA, 20 nt, synthetic construct
  source 1..20: mol_type = other RNA
gatatatttaactatgtagc

SEQ ID NO: 16737 - RNA, 20 nt, synthetic construct
  source 1..20: mol_type = other RNA
gatatgatgcttagagctcc

SEQ ID NO: 16738 - RNA, 20 nt, synthetic construct
  source 1..20: mol_type = other RNA
gatcaaaagataacactaaa

SEQ ID NO: 16739 - RNA, 20 nt, synthetic construct
  source 1..20: mol_type = other RNA
gatcaagagagggagaaagc

SEQ ID NO: 16740 - RNA, 20 nt, synthetic construct
  source 1..20: mol_type = other RNA
gatcaagtatgagtgagagt

SEQ ID NO: 16741 - RNA, 20 nt, synthetic construct
  source 1..20: mol_type = other RNA
gatcacctgagttttatacc

SEQ ID NO: 16742 - RNA, 20 nt, synthetic construct
  source 1..20: mol_type = other RNA
gatcacctggactgtgaaga

SEQ ID NO: 16743 - RNA, 20 nt, synthetic construct
  source 1..20: mol_type = other RNA
gatcagttactaactggtaa

SEQ ID NO: 16744 - RNA, 20 nt, synthetic construct
  source 1..20: mol_type = other RNA
gatcatgctttatgtctgtc

SEQ ID NO: 16745 - RNA, 20 nt, synthetic construct
  source 1..20: mol_type = other RNA
gatccaattctctgtaaagc

SEQ ID NO: 16746 - RNA, 20 nt, synthetic construct
  source 1..20: mol_type = other RNA
gatccatcttacatcttgtt

SEQ ID NO: 16747 - RNA, 20 nt, synthetic construct
  source 1..20: mol_type = other RNA
gatcccattttccatttgtt

SEQ ID NO: 16748 - RNA, 20 nt, synthetic construct
  source 1..20: mol_type = other RNA
gatctcagatgcctgtgtga

SEQ ID NO: 16749 - RNA, 20 nt, synthetic construct
  source 1..20: mol_type = other RNA
gatctgaggttaggcaacat

SEQ ID NO: 16750 - RNA, 20 nt, synthetic construct
  source 1..20: mol_type = other RNA
gatcttgactactgctttac

SEQ ID NO: 16751 - RNA, 20 nt, synthetic construct
  source 1..20: mol_type = other RNA
gatcttgggtagcctggtgt

SEQ ID NO: 16752 - RNA, 20 nt, synthetic construct
  source 1..20: mol_type = other RNA
gatgaattctgttctcgtga

SEQ ID NO: 16753 - RNA, 20 nt, synthetic construct
  source 1..20: mol_type = other RNA
gatgacatttgaatctgcag

SEQ ID NO: 16754 - RNA, 20 nt, synthetic construct
  source 1..20: mol_type = other RNA
gatgattgtcctaaaggaag

SEQ ID NO: 16755 - RNA, 20 nt, synthetic construct
  source 1..20: mol_type = other RNA
gatgcaaaggggtagagagc

SEQ ID NO: 16756 - RNA, 20 nt, synthetic construct
  source 1..20: mol_type = other RNA
gatgcataaggtccctggat

SEQ ID NO: 16757 - RNA, 20 nt, synthetic construct
  source 1..20: mol_type = other RNA
gatgcctggtagggatgcaa

SEQ ID NO: 16758 - RNA, 20 nt, synthetic construct
  source 1..20: mol_type = other RNA
gatgcctgtgtgatagcttc

SEQ ID NO: 16759 - RNA, 20 nt, synthetic construct
  source 1..20: mol_type = other RNA
gatgctacactttggtggtg

SEQ ID NO: 16760 - RNA, 20 nt, synthetic construct
  source 1..20: mol_type = other RNA
gatgcttagagctcctccaa

SEQ ID NO: 16761 - RNA, 20 nt, synthetic construct
  source 1..20: mol_type = other RNA
gatggatcaaaagataacac

SEQ ID NO: 16762 - RNA, 20 nt, synthetic construct
  source 1..20: mol_type = other RNA
gatggttttctctttttact

SEQ ID NO: 16763 - RNA, 20 nt, synthetic construct
  source 1..20: mol_type = other RNA
gatgtaagatggatcaaaag

SEQ ID NO: 16764 - RNA, 20 nt, synthetic construct
  source 1..20: mol_type = other RNA
gatgtctagccaactttaag

SEQ ID NO: 16765 - RNA, 20 nt, synthetic construct
  source 1..20: mol_type = other RNA
gatgtgcctgccttggacaa

SEQ ID NO: 16766 - RNA, 20 nt, synthetic construct
  source 1..20: mol_type = other RNA
gatgttgcctaacctcagat

SEQ ID NO: 16767 - RNA, 20 nt, synthetic construct
  source 1..20: mol_type = other RNA
gattaaaagcagcaagggta

SEQ ID NO: 16768 - RNA, 20 nt, synthetic construct
  source 1..20: mol_type = other RNA
gattaataaaatgtcaaacc

SEQ ID NO: 16769 - RNA, 20 nt, synthetic construct
  source 1..20: mol_type = other RNA
gattacagaatacgtggaca

SEQ ID NO: 16770 - RNA, 20 nt, synthetic construct
  source 1..20: mol_type = other RNA
gattatcactacttatcatt

SEQ ID NO: 16771 - RNA, 20 nt, synthetic construct
  source 1..20: mol_type = other RNA
gattcaaatgtcatctcccc

SEQ ID NO: 16772 - RNA, 20 nt, synthetic construct
  source 1..20: mol_type = other RNA
gattccattaaactgttaca

SEQ ID NO: 16773 - RNA, 20 nt, synthetic construct
  source 1..20: mol_type = other RNA
gattctgtccctgaccgtct

SEQ ID NO: 16774 - RNA, 20 nt, synthetic construct
  source 1..20: mol_type = other RNA
gattggacacccctggttta

SEQ ID NO: 16775 - RNA, 20 nt, synthetic construct
  source 1..20: mol_type = other RNA
gattggaggagctctaagca

SEQ ID NO: 16776 - RNA, 20 nt, synthetic construct
  source 1..20: mol_type = other RNA
gattggttccaccacaaatt

SEQ ID NO: 16777 - RNA, 20 nt, synthetic construct
  source 1..20: mol_type = other RNA
gattgtcctaaaggaagata

SEQ ID NO: 16778 - RNA, 20 nt, synthetic construct
  source 1..20: mol_type = other RNA
gattgttttctataactcaa

SEQ ID NO: 16779 - RNA, 20 nt, synthetic construct
  source 1..20: mol_type = other RNA
gatttaaattaccttaacta

SEQ ID NO: 16780 - RNA, 20 nt, synthetic construct
  source 1..20: mol_type = other RNA
gatttaacctgatgctacac

SEQ ID NO: 16781 - RNA, 20 nt, synthetic construct
  source 1..20: mol_type = other RNA
gatttgggtaactgcaattc

SEQ ID NO: 16782 - RNA, 20 nt, synthetic construct
  source 1..20: mol_type = other RNA
gattttcattttatcctttt

SEQ ID NO: 16783 - RNA, 20 nt, synthetic construct
  source 1..20: mol_type = other RNA
gcaaaggggtagagagcctg

SEQ ID NO: 16784 - RNA, 20 nt, synthetic construct
  source 1..20: mol_type = other RNA
gcaacatctccctttttctt

SEQ ID NO: 16785 - RNA, 20 nt, synthetic construct
  source 1..20: mol_type = other RNA
gcaacgagactgcggattat

SEQ ID NO: 16786 - RNA, 20 nt, synthetic construct
  source 1..20: mol_type = other RNA
gcaactctcactcatacttg

SEQ ID NO: 16787 - RNA, 20 nt, synthetic construct
  source 1..20: mol_type = other RNA
gcaactgtggacagtatagc

SEQ ID NO: 16788 - RNA, 20 nt, synthetic construct
  source 1..20: mol_type = other RNA
gcaagaactgtcttgggcca

SEQ ID NO: 16789 - RNA, 20 nt, synthetic construct
  source 1..20: mol_type = other RNA
gcaagcgttaatgagtttgg

SEQ ID NO: 16790 - RNA, 20 nt, synthetic construct
  source 1..20: mol_type = other RNA
gcaagggtagcattccaaaa

SEQ ID NO: 16791 - RNA, 20 nt, synthetic construct
  source 1..20: mol_type = other RNA
gcaagggtctcaaatggtat

SEQ ID NO: 16792 - RNA, 20 nt, synthetic construct
  source 1..20: mol_type = other RNA
gcaagtacaacaaatggaaa

SEQ ID NO: 16793 - RNA, 20 nt, synthetic construct
  source 1..20: mol_type = other RNA
gcaagttgtctaacccgcgg

SEQ ID NO: 16794 - RNA, 20 nt, synthetic construct
  source 1..20: mol_type = other RNA
gcaatataaaaagcatttgg

SEQ ID NO: 16795 - RNA, 20 nt, synthetic construct
  source 1..20: mol_type = other RNA
gcaatgacaacaaccccaga

SEQ ID NO: 16796 - RNA, 20 nt, synthetic construct
  source 1..20: mol_type = other RNA
gcaattcattccatgtgact

SEQ ID NO: 16797 - RNA, 20 nt, synthetic construct
  source 1..20: mol_type = other RNA
gcaatttggaagctatcaca

SEQ ID NO: 16798 - RNA, 20 nt, synthetic construct
  source 1..20: mol_type = other RNA
gcacatctttaaaaatggtt

SEQ ID NO: 16799 - RNA, 20 nt, synthetic construct
  source 1..20: mol_type = other RNA
gcaccaccaaagtgtagcat

SEQ ID NO: 16800 - RNA, 20 nt, synthetic construct
  source 1..20: mol_type = other RNA
gcactagctttctccctctc

SEQ ID NO: 16801 - RNA, 20 nt, synthetic construct
  source 1..20: mol_type = other RNA
gcactgctgggtaagagtca

SEQ ID NO: 16802 - RNA, 20 nt, synthetic construct
  source 1..20: mol_type = other RNA
gcactggtttctcaagcaaa

SEQ ID NO: 16803 - RNA, 20 nt, synthetic construct
  source 1..20: mol_type = other RNA
gcagattcaaatgtcatctc

SEQ ID NO: 16804 - RNA, 20 nt, synthetic construct
  source 1..20: mol_type = other RNA
gcagcaagggtagcattcca

SEQ ID NO: 16805 - RNA, 20 nt, synthetic construct
  source 1..20: mol_type = other RNA
gcagcaagggtctcaaatgg

SEQ ID NO: 16806 - RNA, 20 nt, synthetic construct
  source 1..20: mol_type = other RNA
gcaggattaaaagcagcaag

SEQ ID NO: 16807 - RNA, 20 nt, synthetic construct
  source 1..20: mol_type = other RNA
gcaggcacatctttaaaaat

SEQ ID NO: 16808 - RNA, 20 nt, synthetic construct
  source 1..20: mol_type = other RNA
gcagtaaggaaataaaagct

SEQ ID NO: 16809 - RNA, 20 nt, synthetic construct
  source 1..20: mol_type = other RNA
gcagtacaaactgctcagga

SEQ ID NO: 16810 - RNA, 20 nt, synthetic construct
  source 1..20: mol_type = other RNA
gcagtagtcaagatcacctg

SEQ ID NO: 16811 - RNA, 20 nt, synthetic construct
  source 1..20: mol_type = other RNA
gcagtgcttttattcctccc

SEQ ID NO: 16812 - RNA, 20 nt, synthetic construct
  source 1..20: mol_type = other RNA
gcagtgtggcccagggaagc

SEQ ID NO: 16813 - RNA, 20 nt, synthetic construct
  source 1..20: mol_type = other RNA
gcagttaaatgaaatgtaat

SEQ ID NO: 16814 - RNA, 20 nt, synthetic construct
  source 1..20: mol_type = other RNA
gcagttacccaaatcataga

SEQ ID NO: 16815 - RNA, 20 nt, synthetic construct
  source 1..20: mol_type = other RNA
gcagtttgggtcatagaaca

SEQ ID NO: 16816 - RNA, 20 nt, synthetic construct
  source 1..20: mol_type = other RNA
gcagtttgtactgcgtgggt

SEQ ID NO: 16817 - RNA, 20 nt, synthetic construct
  source 1..20: mol_type = other RNA
gcagttttcttctgactcct

SEQ ID NO: 16818 - RNA, 20 nt, synthetic construct
  source 1..20: mol_type = other RNA
gcataaggtccctggataga

SEQ ID NO: 16819 - RNA, 20 nt, synthetic construct
  source 1..20: mol_type = other RNA
gcataatgaattttagggag

SEQ ID NO: 16820 - RNA, 20 nt, synthetic construct
  source 1..20: mol_type = other RNA
gcatcacattcacgagaaca

SEQ ID NO: 16821 - RNA, 20 nt, synthetic construct
  source 1..20: mol_type = other RNA
gcatcaggttaaatcttaat

SEQ ID NO: 16822 - RNA, 20 nt, synthetic construct
  source 1..20: mol_type = other RNA
gcatcatatcttgagttata

SEQ ID NO: 16823 - RNA, 20 nt, synthetic construct
  source 1..20: mol_type = other RNA
gcatccctaccaggcatctt

SEQ ID NO: 16824 - RNA, 20 nt, synthetic construct
  source 1..20: mol_type = other RNA
gcatctgagatcagttacta

SEQ ID NO: 16825 - RNA, 20 nt, synthetic construct
  source 1..20: mol_type = other RNA
gcatcttagcaactctcact

SEQ ID NO: 16826 - RNA, 20 nt, synthetic construct
  source 1..20: mol_type = other RNA
gcatgaaaatgacaggtgaa

SEQ ID NO: 16827 - RNA, 20 nt, synthetic construct
  source 1..20: mol_type = other RNA
gcatgaccaaaggggagatg

SEQ ID NO: 16828 - RNA, 20 nt, synthetic construct
  source 1..20: mol_type = other RNA
gcatgatcacctgagtttta

SEQ ID NO: 16829 - RNA, 20 nt, synthetic construct
  source 1..20: mol_type = other RNA
gcatgggacccaggacagct

SEQ ID NO: 16830 - RNA, 20 nt, synthetic construct
  source 1..20: mol_type = other RNA
gcattcaaagctgtcctggg

SEQ ID NO: 16831 - RNA, 20 nt, synthetic construct
  source 1..20: mol_type = other RNA
gcattccaaaaagaaccacc

SEQ ID NO: 16832 - RNA, 20 nt, synthetic construct
  source 1..20: mol_type = other RNA
gcattggaaaagtggctggt

SEQ ID NO: 16833 - RNA, 20 nt, synthetic construct
  source 1..20: mol_type = other RNA
gcatttggtgttaaaatgtt

SEQ ID NO: 16834 - RNA, 20 nt, synthetic construct
  source 1..20: mol_type = other RNA
gcatttttctagagacagac

SEQ ID NO: 16835 - RNA, 20 nt, synthetic construct
  source 1..20: mol_type = other RNA
gccaactttaagtaaatgga

SEQ ID NO: 16836 - RNA, 20 nt, synthetic construct
  source 1..20: mol_type = other RNA
gccacactgcaagaactgtc

SEQ ID NO: 16837 - RNA, 20 nt, synthetic construct
  source 1..20: mol_type = other RNA
gccacatataaaggacagct

SEQ ID NO: 16838 - RNA, 20 nt, synthetic construct
  source 1..20: mol_type = other RNA
gccacttttccaatgctcaa

SEQ ID NO: 16839 - RNA, 20 nt, synthetic construct
  source 1..20: mol_type = other RNA
gccagagagcttcagctttt

SEQ ID NO: 16840 - RNA, 20 nt, synthetic construct
  source 1..20: mol_type = other RNA
gccagtaatggagtttcacc

SEQ ID NO: 16841 - RNA, 20 nt, synthetic construct
  source 1..20: mol_type = other RNA
gcccaagacagttcttgcag

SEQ ID NO: 16842 - RNA, 20 nt, synthetic construct
  source 1..20: mol_type = other RNA
gcccattacatttcatttaa

SEQ ID NO: 16843 - RNA, 20 nt, synthetic construct
  source 1..20: mol_type = other RNA
gccccagctcaagccttaat

SEQ ID NO: 16844 - RNA, 20 nt, synthetic construct
  source 1..20: mol_type = other RNA
gccccggacttgttctgtgg

SEQ ID NO: 16845 - RNA, 20 nt, synthetic construct
  source 1..20: mol_type = other RNA
gcccgcgggttagacaactt

SEQ ID NO: 16846 - RNA, 20 nt, synthetic construct
  source 1..20: mol_type = other RNA
gcccttttaaaaaagcagtt

SEQ ID NO: 16847 - RNA, 20 nt, synthetic construct
  source 1..20: mol_type = other RNA
gccgaaagattggacacccc

SEQ ID NO: 16848 - RNA, 20 nt, synthetic construct
  source 1..20: mol_type = other RNA
gccgcatgggacccaggaca

SEQ ID NO: 16849 - RNA, 20 nt, synthetic construct
  source 1..20: mol_type = other RNA
gcctaaatttctgtcctaca

SEQ ID NO: 16850 - RNA, 20 nt, synthetic construct
  source 1..20: mol_type = other RNA
gcctaacctcagatccaatt

SEQ ID NO: 16851 - RNA, 20 nt, synthetic construct
  source 1..20: mol_type = other RNA
gcctgccttggacaacagtg

SEQ ID NO: 16852 - RNA, 20 nt, synthetic construct
  source 1..20: mol_type = other RNA
gcctggggagagagggtgag

SEQ ID NO: 16853 - RNA, 20 nt, synthetic construct
  source 1..20: mol_type = other RNA
gcctggtagggatgcaaagg

SEQ ID NO: 16854 - RNA, 20 nt, synthetic construct
  source 1..20: mol_type = other RNA
gcctggtgtctcgcgaaacc

SEQ ID NO: 16855 - RNA, 20 nt, synthetic construct
  source 1..20: mol_type = other RNA
gcctgtgtgatagcttccaa

SEQ ID NO: 16856 - RNA, 20 nt, synthetic construct
  source 1..20: mol_type = other RNA
gccttaatttgtggtggaac

SEQ ID NO: 16857 - RNA, 20 nt, synthetic construct
  source 1..20: mol_type = other RNA
gccttccatggtctgttgtt

SEQ ID NO: 16858 - RNA, 20 nt, synthetic construct
  source 1..20: mol_type = other RNA
gccttggacaacagtgaaag

SEQ ID NO: 16859 - RNA, 20 nt, synthetic construct
  source 1..20: mol_type = other RNA
gcgaaaccagacagattggt

SEQ ID NO: 16860 - RNA, 20 nt, synthetic construct
  source 1..20: mol_type = other RNA
gcgacatgtaaatgtcttta

SEQ ID NO: 16861 - RNA, 20 nt, synthetic construct
  source 1..20: mol_type = other RNA
gcgagacaccaggctaccca

SEQ ID NO: 16862 - RNA, 20 nt, synthetic construct
  source 1..20: mol_type = other RNA
gcggattatcactacttatc

SEQ ID NO: 16863 - RNA, 20 nt, synthetic construct
  source 1..20: mol_type = other RNA
gcggcccgcgggttagacaa

SEQ ID NO: 16864 - RNA, 20 nt, synthetic construct
  source 1..20: mol_type = other RNA
gcgggccgcatgggacccag

SEQ ID NO: 16865 - RNA, 20 nt, synthetic construct
  source 1..20: mol_type = other RNA
gcgggttagacaacttgctg

SEQ ID NO: 16866 - RNA, 20 nt, synthetic construct
  source 1..20: mol_type = other RNA
gcgtgggtcatagtaattct

SEQ ID NO: 16867 - RNA, 20 nt, synthetic construct
  source 1..20: mol_type = other RNA
gctaagatgcctggtaggga

SEQ ID NO: 16868 - RNA, 20 nt, synthetic construct
  source 1..20: mol_type = other RNA
gctaaggaaaaaggataaaa

SEQ ID NO: 16869 - RNA, 20 nt, synthetic construct
  source 1..20: mol_type = other RNA
gctaagtccaacaaaccatt

SEQ ID NO: 16870 - RNA, 20 nt, synthetic construct
  source 1..20: mol_type = other RNA
gctacactttggtggtgcag

SEQ ID NO: 16871 - RNA, 20 nt, synthetic construct
  source 1..20: mol_type = other RNA
gctacagctatactgtccac

SEQ ID NO: 16872 - RNA, 20 nt, synthetic construct
  source 1..20: mol_type = other RNA
gctacatagttaaatatatc

SEQ ID NO: 16873 - RNA, 20 nt, synthetic construct
  source 1..20: mol_type = other RNA
gctacccaagatcaagagag

SEQ ID NO: 16874 - RNA, 20 nt, synthetic construct
  source 1..20: mol_type = other RNA
gctacccttgctgcttttaa

SEQ ID NO: 16875 - RNA, 20 nt, synthetic construct
  source 1..20: mol_type = other RNA
gctagacatcagagtatact

SEQ ID NO: 16876 - RNA, 20 nt, synthetic construct
  source 1..20: mol_type = other RNA
gctagtgctatgtctgaata

SEQ ID NO: 16877 - RNA, 20 nt, synthetic construct
  source 1..20: mol_type = other RNA
gctatactgtccacagttgc

SEQ ID NO: 16878 - RNA, 20 nt, synthetic construct
  source 1..20: mol_type = other RNA
gctatcacacaggcatctga

SEQ ID NO: 16879 - RNA, 20 nt, synthetic construct
  source 1..20: mol_type = other RNA
gctatgtctgaatactagag

SEQ ID NO: 16880 - RNA, 20 nt, synthetic construct
  source 1..20: mol_type = other RNA
gctcaagattaataaaatgt

SEQ ID NO: 16881 - RNA, 20 nt, synthetic construct
  source 1..20: mol_type = other RNA
gctcaagccttaatttgtgg

SEQ ID NO: 16882 - RNA, 20 nt, synthetic construct
  source 1..20: mol_type = other RNA
gctcactccatttacttaaa

SEQ ID NO: 16883 - RNA, 20 nt, synthetic construct
  source 1..20: mol_type = other RNA
gctcagaatagttaaggtaa

SEQ ID NO: 16884 - RNA, 20 nt, synthetic construct
  source 1..20: mol_type = other RNA
gctcaggagtacaagacact

SEQ ID NO: 16885 - RNA, 20 nt, synthetic construct
  source 1..20: mol_type = other RNA
gctcaggagtcagaagaaaa

SEQ ID NO: 16886 - RNA, 20 nt, synthetic construct
  source 1..20: mol_type = other RNA
gctcagtaaaaagagaaaac

SEQ ID NO: 16887 - RNA, 20 nt, synthetic construct
  source 1..20: mol_type = other RNA
gctcatcagctgtcctttat

SEQ ID NO: 16888 - RNA, 20 nt, synthetic construct
  source 1..20: mol_type = other RNA
gctccaaaaatgataagtag

SEQ ID NO: 16889 - RNA, 20 nt, synthetic construct
  source 1..20: mol_type = other RNA
gctcctagtatactctgatg

SEQ ID NO: 16890 - RNA, 20 nt, synthetic construct
  source 1..20: mol_type = other RNA
gctcctccaatcaagtgttt

SEQ ID NO: 16891 - RNA, 20 nt, synthetic construct
  source 1..20: mol_type = other RNA
gctcctctagtattcagaca

SEQ ID NO: 16892 - RNA, 20 nt, synthetic construct
  source 1..20: mol_type = other RNA
gctcctgtaacagtttaatg

SEQ ID NO: 16893 - RNA, 20 nt, synthetic construct
  source 1..20: mol_type = other RNA
gctctaagcatcatatcttg

SEQ ID NO: 16894 - RNA, 20 nt, synthetic construct
  source 1..20: mol_type = other RNA
gctctatcttcctttaggac

SEQ ID NO: 16895 - RNA, 20 nt, synthetic construct
  source 1..20: mol_type = other RNA
gctctctacccctttgcatc

SEQ ID NO: 16896 - RNA, 20 nt, synthetic construct
  source 1..20: mol_type = other RNA
gctctctggcccattacatt

SEQ ID NO: 16897 - RNA, 20 nt, synthetic construct
  source 1..20: mol_type = other RNA
gctgaaagctaagtccaaca

SEQ ID NO: 16898 - RNA, 20 nt, synthetic construct
  source 1..20: mol_type = other RNA
gctgaagctctctggcccat

SEQ ID NO: 16899 - RNA, 20 nt, synthetic construct
  source 1..20: mol_type = other RNA
gctgatttaaattaccttaa

SEQ ID NO: 16900 - RNA, 20 nt, synthetic construct
  source 1..20: mol_type = other RNA
gctgcaccaccaaagtgtag

SEQ ID NO: 16901 - RNA, 20 nt, synthetic construct
  source 1..20: mol_type = other RNA
gctgcttttaatcctgcaga

SEQ ID NO: 16902 - RNA, 20 nt, synthetic construct
  source 1..20: mol_type = other RNA
gctgggattctgtccctgac

SEQ ID NO: 16903 - RNA, 20 nt, synthetic construct
  source 1..20: mol_type = other RNA
gctggggcttgactcttacc

SEQ ID NO: 16904 - RNA, 20 nt, synthetic construct
  source 1..20: mol_type = other RNA
gctgggtaagagtcaagccc

SEQ ID NO: 16905 - RNA, 20 nt, synthetic construct
  source 1..20: mol_type = other RNA
gctgggttcatttgtatcac

SEQ ID NO: 16906 - RNA, 20 nt, synthetic construct
  source 1..20: mol_type = other RNA
gctggtatgactaaagaact

SEQ ID NO: 16907 - RNA, 20 nt, synthetic construct
  source 1..20: mol_type = other RNA
gctgtaaacagtacaagcca

SEQ ID NO: 16908 - RNA, 20 nt, synthetic construct
  source 1..20: mol_type = other RNA
gctgtagccccggacttgtt

SEQ ID NO: 16909 - RNA, 20 nt, synthetic construct
  source 1..20: mol_type = other RNA
gctgtcctgggtcccatgcg

SEQ ID NO: 16910 - RNA, 20 nt, synthetic construct
  source 1..20: mol_type = other RNA
gctgtcctttatatgtggcc

SEQ ID NO: 16911 - RNA, 20 nt, synthetic construct
  source 1..20: mol_type = other RNA
gctgtctctgtctttagtgt

SEQ ID NO: 16912 - RNA, 20 nt, synthetic construct
  source 1..20: mol_type = other RNA
gctgttaaattgaggaaagt

SEQ ID NO: 16913 - RNA, 20 nt, synthetic construct
  source 1..20: mol_type = other RNA
gcttagagctcctccaatca

SEQ ID NO: 16914 - RNA, 20 nt, synthetic construct
  source 1..20: mol_type = other RNA
gcttcagcttttatttcctt

SEQ ID NO: 16915 - RNA, 20 nt, synthetic construct
  source 1..20: mol_type = other RNA
gcttccaaattgctgtctct

SEQ ID NO: 16916 - RNA, 20 nt, synthetic construct
  source 1..20: mol_type = other RNA
gcttccctccctcaccctct

SEQ ID NO: 16917 - RNA, 20 nt, synthetic construct
  source 1..20: mol_type = other RNA
gcttccctgggccacactgc

SEQ ID NO: 16918 - RNA, 20 nt, synthetic construct
  source 1..20: mol_type = other RNA
gcttgactcttacccagcag

SEQ ID NO: 16919 - RNA, 20 nt, synthetic construct
  source 1..20: mol_type = other RNA
gcttgagaaaccagtgcttc

SEQ ID NO: 16920 - RNA, 20 nt, synthetic construct
  source 1..20: mol_type = other RNA
gcttgagctggggcttgact

SEQ ID NO: 16921 - RNA, 20 nt, synthetic construct
  source 1..20: mol_type = other RNA
gcttgctttcactgttgtcc

SEQ ID NO: 16922 - RNA, 20 nt, synthetic construct
  source 1..20: mol_type = other RNA
gcttgtactgtttacagcaa

SEQ ID NO: 16923 - RNA, 20 nt, synthetic construct
  source 1..20: mol_type = other RNA
gctttacagagaattggatc

SEQ ID NO: 16924 - RNA, 20 nt, synthetic construct
  source 1..20: mol_type = other RNA
gctttatgtctgtctctaga

SEQ ID NO: 16925 - RNA, 20 nt, synthetic construct
  source 1..20: mol_type = other RNA
gctttcactgttgtccaagg

SEQ ID NO: 16926 - RNA, 20 nt, synthetic construct
  source 1..20: mol_type = other RNA
gctttctccctctcttgatc

SEQ ID NO: 16927 - RNA, 20 nt, synthetic construct
  source 1..20: mol_type = other RNA
gcttttaatcctgcagattc

SEQ ID NO: 16928 - RNA, 20 nt, synthetic construct
  source 1..20: mol_type = other RNA
gcttttattcctccctagtt

SEQ ID NO: 16929 - RNA, 20 nt, synthetic construct
  source 1..20: mol_type = other RNA
gcttttatttccttactgct

SEQ ID NO: 16930 - RNA, 20 nt, synthetic construct
  source 1..20: mol_type = other RNA
gcttttgcttgagaaaccag

SEQ ID NO: 16931 - RNA, 20 nt, synthetic construct
  source 1..20: mol_type = other RNA
gctttttatattgctaatac

SEQ ID NO: 16932 - RNA, 20 nt, synthetic construct
  source 1..20: mol_type = other RNA
gctttttcatttttcactat

SEQ ID NO: 16933 - RNA, 20 nt, synthetic construct
  source 1..20: mol_type = other RNA
gctttttgaaggaatagtgt

SEQ ID NO: 16934 - RNA, 20 nt, synthetic construct
  source 1..20: mol_type = other RNA
gcttttttaaaagggcagtt

SEQ ID NO: 16935 - RNA, 20 nt, synthetic construct
  source 1..20: mol_type = other RNA
ggaaaaaggataaaatgaaa

SEQ ID NO: 16936 - RNA, 20 nt, synthetic construct
  source 1..20: mol_type = other RNA
ggaaaagtggctggtatgac

SEQ ID NO: 16937 - RNA, 20 nt, synthetic construct
  source 1..20: mol_type = other RNA
ggaaaatagtgaaaaatgaa

SEQ ID NO: 16938 - RNA, 20 nt, synthetic construct
  source 1..20: mol_type = other RNA
ggaaaatgggatcaagtatg

SEQ ID NO: 16939 - RNA, 20 nt, synthetic construct
  source 1..20: mol_type = other RNA
ggaaacacttgattggagga

SEQ ID NO: 16940 - RNA, 20 nt, synthetic construct
  source 1..20: mol_type = other RNA
ggaaagtctatccagggacc

SEQ ID NO: 16941 - RNA, 20 nt, synthetic construct
  source 1..20: mol_type = other RNA
ggaaataaaagctgaagctc

SEQ ID NO: 16942 - RNA, 20 nt, synthetic construct
  source 1..20: mol_type = other RNA
ggaaccaatctgtctggttt

SEQ ID NO: 16943 - RNA, 20 nt, synthetic construct
  source 1..20: mol_type = other RNA
ggaagaaaaagggagatgtt

SEQ ID NO: 16944 - RNA, 20 nt, synthetic construct
  source 1..20: mol_type = other RNA
ggaagatagagcatgaaaat

SEQ ID NO: 16945 - RNA, 20 nt, synthetic construct
  source 1..20: mol_type = other RNA
ggaagcactggtttctcaag

SEQ ID NO: 16946 - RNA, 20 nt, synthetic construct
  source 1..20: mol_type = other RNA
ggaagctatcacacaggcat

SEQ ID NO: 16947 - RNA, 20 nt, synthetic construct
  source 1..20: mol_type = other RNA
ggaaggcatgaccaaagggg

SEQ ID NO: 16948 - RNA, 20 nt, synthetic construct
  source 1..20: mol_type = other RNA
ggaagtgaaaacttgtagga

SEQ ID NO: 16949 - RNA, 20 nt, synthetic construct
  source 1..20: mol_type = other RNA
ggaataaaagcactgctggg

SEQ ID NO: 16950 - RNA, 20 nt, synthetic construct
  source 1..20: mol_type = other RNA
ggaatagtgtcttgtactcc

SEQ ID NO: 16951 - RNA, 20 nt, synthetic construct
  source 1..20: mol_type = other RNA
ggaatctcacctccctaaaa

SEQ ID NO: 16952 - RNA, 20 nt, synthetic construct
  source 1..20: mol_type = other RNA
ggaatgaattgcagttaccc

SEQ ID NO: 16953 - RNA, 20 nt, synthetic construct
  source 1..20: mol_type = other RNA
ggaatgctacccttgctgct

SEQ ID NO: 16954 - RNA, 20 nt, synthetic construct
  source 1..20: mol_type = other RNA
ggaattataataccaacatt

SEQ ID NO: 16955 - RNA, 20 nt, synthetic construct
  source 1..20: mol_type = other RNA
ggacaacagtgaaagcaagc

SEQ ID NO: 16956 - RNA, 20 nt, synthetic construct
  source 1..20: mol_type = other RNA
ggacaatcatcctaacaaga

SEQ ID NO: 16957 - RNA, 20 nt, synthetic construct
  source 1..20: mol_type = other RNA
ggacacccctggtttacagg

SEQ ID NO: 16958 - RNA, 20 nt, synthetic construct
  source 1..20: mol_type = other RNA
ggacagaaatttaggctggg

SEQ ID NO: 16959 - RNA, 20 nt, synthetic construct
  source 1..20: mol_type = other RNA
ggacagaatcccagctaagg

SEQ ID NO: 16960 - RNA, 20 nt, synthetic construct
  source 1..20: mol_type = other RNA
ggacagtatagctgtagccc

SEQ ID NO: 16961 - RNA, 20 nt, synthetic construct
  source 1..20: mol_type = other RNA
ggacattgatggttttctct

SEQ ID NO: 16962 - RNA, 20 nt, synthetic construct
  source 1..20: mol_type = other RNA
ggacccaggacagctttgaa

SEQ ID NO: 16963 - RNA, 20 nt, synthetic construct
  source 1..20: mol_type = other RNA
ggaccttatgcatcacattc

SEQ ID NO: 16964 - RNA, 20 nt, synthetic construct
  source 1..20: mol_type = other RNA
ggactgtgaagacggtcagg

SEQ ID NO: 16965 - RNA, 20 nt, synthetic construct
  source 1..20: mol_type = other RNA
ggacttagctttcagctaaa

SEQ ID NO: 16966 - RNA, 20 nt, synthetic construct
  source 1..20: mol_type = other RNA
ggacttgttctgtggattac

SEQ ID NO: 16967 - RNA, 20 nt, synthetic construct
  source 1..20: mol_type = other RNA
ggagaaagctagtgctatgt

SEQ ID NO: 16968 - RNA, 20 nt, synthetic construct
  source 1..20: mol_type = other RNA
ggagagagggtgagggaggg

SEQ ID NO: 16969 - RNA, 20 nt, synthetic construct
  source 1..20: mol_type = other RNA
ggagagaggtcatatttgtg

SEQ ID NO: 16970 - RNA, 20 nt, synthetic construct
  source 1..20: mol_type = other RNA
ggagatgacatttgaatctg

SEQ ID NO: 16971 - RNA, 20 nt, synthetic construct
  source 1..20: mol_type = other RNA
ggagatgttgcctaacctca

SEQ ID NO: 16972 - RNA, 20 nt, synthetic construct
  source 1..20: mol_type = other RNA
ggagcaagtacaacaaatgg

SEQ ID NO: 16973 - RNA, 20 nt, synthetic construct
  source 1..20: mol_type = other RNA
ggagcatttttctagagaca

SEQ ID NO: 16974 - RNA, 20 nt, synthetic construct
  source 1..20: mol_type = other RNA
ggagctacatagttaaatat

SEQ ID NO: 16975 - RNA, 20 nt, synthetic construct
  source 1..20: mol_type = other RNA
ggagctcaggagtacaagac

SEQ ID NO: 16976 - RNA, 20 nt, synthetic construct
  source 1..20: mol_type = other RNA
ggagctctaagcatcatatc

SEQ ID NO: 16977 - RNA, 20 nt, synthetic construct
  source 1..20: mol_type = other RNA
ggaggaataaaagcactgct

SEQ ID NO: 16978 - RNA, 20 nt, synthetic construct
  source 1..20: mol_type = other RNA
ggaggagctctaagcatcat

SEQ ID NO: 16979 - RNA, 20 nt, synthetic construct
  source 1..20: mol_type = other RNA
ggagggaagcactggtttct

SEQ ID NO: 16980 - RNA, 20 nt, synthetic construct
  source 1..20: mol_type = other RNA
ggaggtgagattccattaaa

SEQ ID NO: 16981 - RNA, 20 nt, synthetic construct
  source 1..20: mol_type = other RNA
ggagtacaagacactattcc

SEQ ID NO: 16982 - RNA, 20 nt, synthetic construct
  source 1..20: mol_type = other RNA
ggagtcagaagaaaactgct

SEQ ID NO: 16983 - RNA, 20 nt, synthetic construct
  source 1..20: mol_type = other RNA
ggagtgagcgacatgtaaat

SEQ ID NO: 16984 - RNA, 20 nt, synthetic construct
  source 1..20: mol_type = other RNA
ggagtttcacctgtcatttt

SEQ ID NO: 16985 - RNA, 20 nt, synthetic construct
  source 1..20: mol_type = other RNA
ggataaaacttactttgtga

SEQ ID NO: 16986 - RNA, 20 nt, synthetic construct
  source 1..20: mol_type = other RNA
ggatagactttcctcaattt

SEQ ID NO: 16987 - RNA, 20 nt, synthetic construct
  source 1..20: mol_type = other RNA
ggatcaaaagataacactaa

SEQ ID NO: 16988 - RNA, 20 nt, synthetic construct
  source 1..20: mol_type = other RNA
ggatcaagtatgagtgagag

SEQ ID NO: 16989 - RNA, 20 nt, synthetic construct
  source 1..20: mol_type = other RNA
ggatctgaggttaggcaaca

SEQ ID NO: 16990 - RNA, 20 nt, synthetic construct
  source 1..20: mol_type = other RNA
ggatgaattctgttctcgtg

SEQ ID NO: 16991 - RNA, 20 nt, synthetic construct
  source 1..20: mol_type = other RNA
ggatgattgtcctaaaggaa

SEQ ID NO: 16992 - RNA, 20 nt, synthetic construct
  source 1..20: mol_type = other RNA
ggatgcaaaggggtagagag

SEQ ID NO: 16993 - RNA, 20 nt, synthetic construct
  source 1..20: mol_type = other RNA
ggattaaaagcagcaagggt

SEQ ID NO: 16994 - RNA, 20 nt, synthetic construct
  source 1..20: mol_type = other RNA
ggattacagaatacgtggac

SEQ ID NO: 16995 - RNA, 20 nt, synthetic construct
  source 1..20: mol_type = other RNA
ggattatcactacttatcat

SEQ ID NO: 16996 - RNA, 20 nt, synthetic construct
  source 1..20: mol_type = other RNA
ggattctgtccctgaccgtc

SEQ ID NO: 16997 - RNA, 20 nt, synthetic construct
  source 1..20: mol_type = other RNA
ggcaacatctccctttttct

SEQ ID NO: 16998 - RNA, 20 nt, synthetic construct
  source 1..20: mol_type = other RNA
ggcacatctttaaaaatggt

SEQ ID NO: 16999 - RNA, 20 nt, synthetic construct
  source 1..20: mol_type = other RNA
ggcaggcacatctttaaaaa

SEQ ID NO: 17000 - RNA, 20 nt, synthetic construct
  source 1..20: mol_type = other RNA
ggcagtttgggtcatagaac

SEQ ID NO: 17001 - RNA, 20 nt, synthetic construct
  source 1..20: mol_type = other RNA
ggcatctgagatcagttact

SEQ ID NO: 17002 - RNA, 20 nt, synthetic construct
  source 1..20: mol_type = other RNA
ggcatcttagcaactctcac

SEQ ID NO: 17003 - RNA, 20 nt, synthetic construct
  source 1..20: mol_type = other RNA
ggcatgaccaaaggggagat

SEQ ID NO: 17004 - RNA, 20 nt, synthetic construct
  source 1..20: mol_type = other RNA
ggccacactgcaagaactgt

SEQ ID NO: 17005 - RNA, 20 nt, synthetic construct
  source 1..20: mol_type = other RNA
ggccacatataaaggacagc

SEQ ID NO: 17006 - RNA, 20 nt, synthetic construct
  source 1..20: mol_type = other RNA
ggccagagagcttcagcttt

SEQ ID NO: 17007 - RNA, 20 nt, synthetic construct
  source 1..20: mol_type = other RNA
ggcccaagacagttcttgca

SEQ ID NO: 17008 - RNA, 20 nt, synthetic construct
  source 1..20: mol_type = other RNA
ggcccattacatttcattta

SEQ ID NO: 17009 - RNA, 20 nt, synthetic construct
  source 1..20: mol_type = other RNA
ggcccgcgggttagacaact

SEQ ID NO: 17010 - RNA, 20 nt, synthetic construct
  source 1..20: mol_type = other RNA
ggccgcatgggacccaggac

SEQ ID NO: 17011 - RNA, 20 nt, synthetic construct
  source 1..20: mol_type = other RNA
ggctacagctatactgtcca

SEQ ID NO: 17012 - RNA, 20 nt, synthetic construct
  source 1..20: mol_type = other RNA
ggctacccaagatcaagaga

SEQ ID NO: 17013 - RNA, 20 nt, synthetic construct
  source 1..20: mol_type = other RNA
ggctagacatcagagtatac

SEQ ID NO: 17014 - RNA, 20 nt, synthetic construct
  source 1..20: mol_type = other RNA
ggctctctacccctttgcat

SEQ ID NO: 17015 - RNA, 20 nt, synthetic construct
  source 1..20: mol_type = other RNA
ggctgggttcatttgtatca

SEQ ID NO: 17016 - RNA, 20 nt, synthetic construct
  source 1..20: mol_type = other RNA
ggctggtatgactaaagaac

SEQ ID NO: 17017 - RNA, 20 nt, synthetic construct
  source 1..20: mol_type = other RNA
ggcttccctgggccacactg

SEQ ID NO: 17018 - RNA, 20 nt, synthetic construct
  source 1..20: mol_type = other RNA
ggcttgactcttacccagca

SEQ ID NO: 17019 - RNA, 20 nt, synthetic construct
  source 1..20: mol_type = other RNA
ggcttgagctggggcttgac

SEQ ID NO: 17020 - RNA, 20 nt, synthetic construct
  source 1..20: mol_type = other RNA
ggcttgtactgtttacagca

SEQ ID NO: 17021 - RNA, 20 nt, synthetic construct
  source 1..20: mol_type = other RNA
gggaagcactggtttctcaa

SEQ ID NO: 17022 - RNA, 20 nt, synthetic construct
  source 1..20: mol_type = other RNA
gggacagaatcccagctaag

SEQ ID NO: 17023 - RNA, 20 nt, synthetic construct
  source 1..20: mol_type = other RNA
gggacccaggacagctttga

SEQ ID NO: 17024 - RNA, 20 nt, synthetic construct
  source 1..20: mol_type = other RNA
gggaccttatgcatcacatt

SEQ ID NO: 17025 - RNA, 20 nt, synthetic construct
  source 1..20: mol_type = other RNA
gggagaaagctagtgctatg

SEQ ID NO: 17026 - RNA, 20 nt, synthetic construct
  source 1..20: mol_type = other RNA
gggagagagggtgagggagg

SEQ ID NO: 17027 - RNA, 20 nt, synthetic construct
  source 1..20: mol_type = other RNA
gggagatgacatttgaatct

SEQ ID NO: 17028 - RNA, 20 nt, synthetic construct
  source 1..20: mol_type = other RNA
gggagatgttgcctaacctc

SEQ ID NO: 17029 - RNA, 20 nt, synthetic construct
  source 1..20: mol_type = other RNA
gggaggaataaaagcactgc

SEQ ID NO: 17030 - RNA, 20 nt, synthetic construct
  source 1..20: mol_type = other RNA
gggagggaagcactggtttc

SEQ ID NO: 17031 - RNA, 20 nt, synthetic construct
  source 1..20: mol_type = other RNA
gggaggtgagattccattaa

SEQ ID NO: 17032 - RNA, 20 nt, synthetic construct
  source 1..20: mol_type = other RNA
gggatcaagtatgagtgaga

SEQ ID NO: 17033 - RNA, 20 nt, synthetic construct
  source 1..20: mol_type = other RNA
gggatgcaaaggggtagaga

SEQ ID NO: 17034 - RNA, 20 nt, synthetic construct
  source 1..20: mol_type = other RNA
gggattctgtccctgaccgt

SEQ ID NO: 17035 - RNA, 20 nt, synthetic construct
  source 1..20: mol_type = other RNA
gggcagtttgggtcatagaa

SEQ ID NO: 17036 - RNA, 20 nt, synthetic construct
  source 1..20: mol_type = other RNA
gggccacactgcaagaactg

SEQ ID NO: 17037 - RNA, 20 nt, synthetic construct
  source 1..20: mol_type = other RNA
gggccacatataaaggacag

SEQ ID NO: 17038 - RNA, 20 nt, synthetic construct
  source 1..20: mol_type = other RNA
gggccagagagcttcagctt

SEQ ID NO: 17039 - RNA, 20 nt, synthetic construct
  source 1..20: mol_type = other RNA
gggccgcatgggacccagga

SEQ ID NO: 17040 - RNA, 20 nt, synthetic construct
  source 1..20: mol_type = other RNA
gggctacagctatactgtcc

SEQ ID NO: 17041 - RNA, 20 nt, synthetic construct
  source 1..20: mol_type = other RNA
gggcttgactcttacccagc

SEQ ID NO: 17042 - RNA, 20 nt, synthetic construct
  source 1..20: mol_type = other RNA
ggggagagagggtgagggag

SEQ ID NO: 17043 - RNA, 20 nt, synthetic construct
  source 1..20: mol_type = other RNA
ggggagatgacatttgaatc

SEQ ID NO: 17044 - RNA, 20 nt, synthetic construct
  source 1..20: mol_type = other RNA
ggggctacagctatactgtc

SEQ ID NO: 17045 - RNA, 20 nt, synthetic construct
  source 1..20: mol_type = other RNA
ggggcttgactcttacccag

SEQ ID NO: 17046 - RNA, 20 nt, synthetic construct
  source 1..20: mol_type = other RNA
ggggtagagagcctggggag

SEQ ID NO: 17047 - RNA, 20 nt, synthetic construct
  source 1..20: mol_type = other RNA
ggggtggttctttttggaat

SEQ ID NO: 17048 - RNA, 20 nt, synthetic construct
  source 1..20: mol_type = other RNA
ggggttgttgtcattgctga

SEQ ID NO: 17049 - RNA, 20 nt, synthetic construct
  source 1..20: mol_type = other RNA
gggtaactgcaattcattcc

SEQ ID NO: 17050 - RNA, 20 nt, synthetic construct
  source 1..20: mol_type = other RNA
gggtaagagtcaagccccag

SEQ ID NO: 17051 - RNA, 20 nt, synthetic construct
  source 1..20: mol_type = other RNA
gggtagagagcctggggaga

SEQ ID NO: 17052 - RNA, 20 nt, synthetic construct
  source 1..20: mol_type = other RNA
gggtagcattccaaaaagaa

SEQ ID NO: 17053 - RNA, 20 nt, synthetic construct
  source 1..20: mol_type = other RNA
gggtagcctggtgtctcgcg

SEQ ID NO: 17054 - RNA, 20 nt, synthetic construct
  source 1..20: mol_type = other RNA
gggtcatagaacaacagacc

SEQ ID NO: 17055 - RNA, 20 nt, synthetic construct
  source 1..20: mol_type = other RNA
gggtcatagtaattctgggg

SEQ ID NO: 17056 - RNA, 20 nt, synthetic construct
  source 1..20: mol_type = other RNA
gggtcccatgcggcccgcgg

SEQ ID NO: 17057 - RNA, 20 nt, synthetic construct
  source 1..20: mol_type = other RNA
gggtcgcattcaaagctgtc

SEQ ID NO: 17058 - RNA, 20 nt, synthetic construct
  source 1..20: mol_type = other RNA
gggtctcaaatggtataaaa

SEQ ID NO: 17059 - RNA, 20 nt, synthetic construct
  source 1..20: mol_type = other RNA
gggtgagggagggaagcact

SEQ ID NO: 17060 - RNA, 20 nt, synthetic construct
  source 1..20: mol_type = other RNA
gggtggttctttttggaatg

SEQ ID NO: 17061 - RNA, 20 nt, synthetic construct
  source 1..20: mol_type = other RNA
gggttagacaacttgctgta

SEQ ID NO: 17062 - RNA, 20 nt, synthetic construct
  source 1..20: mol_type = other RNA
gggttcatttgtatcacaca

SEQ ID NO: 17063 - RNA, 20 nt, synthetic construct
  source 1..20: mol_type = other RNA
gggttgttgtcattgctgat

SEQ ID NO: 17064 - RNA, 20 nt, synthetic construct
  source 1..20: mol_type = other RNA
ggtaactgcaattcattcca

SEQ ID NO: 17065 - RNA, 20 nt, synthetic construct
  source 1..20: mol_type = other RNA
ggtaagaacagaaatgagag

SEQ ID NO: 17066 - RNA, 20 nt, synthetic construct
  source 1..20: mol_type = other RNA
ggtaagagtcaagccccagc

SEQ ID NO: 17067 - RNA, 20 nt, synthetic construct
  source 1..20: mol_type = other RNA
ggtaatttaaatcagcaatg

SEQ ID NO: 17068 - RNA, 20 nt, synthetic construct
  source 1..20: mol_type = other RNA
ggtagagagcctggggagag

SEQ ID NO: 17069 - RNA, 20 nt, synthetic construct
  source 1..20: mol_type = other RNA
ggtagcattccaaaaagaac

SEQ ID NO: 17070 - RNA, 20 nt, synthetic construct
  source 1..20: mol_type = other RNA
ggtagcctggtgtctcgcga

SEQ ID NO: 17071 - RNA, 20 nt, synthetic construct
  source 1..20: mol_type = other RNA
ggtagggatgcaaaggggta

SEQ ID NO: 17072 - RNA, 20 nt, synthetic construct
  source 1..20: mol_type = other RNA
ggtataaaactcaggtgatc

SEQ ID NO: 17073 - RNA, 20 nt, synthetic construct
  source 1..20: mol_type = other RNA
ggtatgactaaagaactgaa

SEQ ID NO: 17074 - RNA, 20 nt, synthetic construct
  source 1..20: mol_type = other RNA
ggtattataattcctcagga

SEQ ID NO: 17075 - RNA, 20 nt, synthetic construct
  source 1..20: mol_type = other RNA
ggtatttagaggaagaaaaa

SEQ ID NO: 17076 - RNA, 20 nt, synthetic construct
  source 1..20: mol_type = other RNA
ggtcagggacagaatcccag

SEQ ID NO: 17077 - RNA, 20 nt, synthetic construct
  source 1..20: mol_type = other RNA
ggtcatagaacaacagacca

SEQ ID NO: 17078 - RNA, 20 nt, synthetic construct
  source 1..20: mol_type = other RNA
ggtcatagtaattctggggt

SEQ ID NO: 17079 - RNA, 20 nt, synthetic construct
  source 1..20: mol_type = other RNA
ggtcatatttgtgtgtgtag

SEQ ID NO: 17080 - RNA, 20 nt, synthetic construct
  source 1..20: mol_type = other RNA
ggtcatgccttccatggtct

SEQ ID NO: 17081 - RNA, 20 nt, synthetic construct
  source 1..20: mol_type = other RNA
ggtcccatgcggcccgcggg

SEQ ID NO: 17082 - RNA, 20 nt, synthetic construct
  source 1..20: mol_type = other RNA
ggtccctggatagactttcc

SEQ ID NO: 17083 - RNA, 20 nt, synthetic construct
  source 1..20: mol_type = other RNA
ggtcgcattcaaagctgtcc

SEQ ID NO: 17084 - RNA, 20 nt, synthetic construct
  source 1..20: mol_type = other RNA
ggtctcaaatggtataaaac

SEQ ID NO: 17085 - RNA, 20 nt, synthetic construct
  source 1..20: mol_type = other RNA
ggtctgtgtgatacaaatga

SEQ ID NO: 17086 - RNA, 20 nt, synthetic construct
  source 1..20: mol_type = other RNA
ggtctgttgttctatgaccc

SEQ ID NO: 17087 - RNA, 20 nt, synthetic construct
  source 1..20: mol_type = other RNA
ggtgaaactccattactggc

SEQ ID NO: 17088 - RNA, 20 nt, synthetic construct
  source 1..20: mol_type = other RNA
ggtgagattccattaaactg

SEQ ID NO: 17089 - RNA, 20 nt, synthetic construct
  source 1..20: mol_type = other RNA
ggtgagggagggaagcactg

SEQ ID NO: 17090 - RNA, 20 nt, synthetic construct
  source 1..20: mol_type = other RNA
ggtgatcatgctttatgtct

SEQ ID NO: 17091 - RNA, 20 nt, synthetic construct
  source 1..20: mol_type = other RNA
ggtgatcttgactactgctt

SEQ ID NO: 17092 - RNA, 20 nt, synthetic construct
  source 1..20: mol_type = other RNA
ggtgcagcaagggtctcaaa

SEQ ID NO: 17093 - RNA, 20 nt, synthetic construct
  source 1..20: mol_type = other RNA
ggtggaaccaatctgtctgg

SEQ ID NO: 17094 - RNA, 20 nt, synthetic construct
  source 1..20: mol_type = other RNA
ggtggtgcagcaagggtctc

SEQ ID NO: 17095 - RNA, 20 nt, synthetic construct
  source 1..20: mol_type = other RNA
ggtggttctttttggaatgc

SEQ ID NO: 17096 - RNA, 20 nt, synthetic construct
  source 1..20: mol_type = other RNA
ggtgtctcgcgaaaccagac

SEQ ID NO: 17097 - RNA, 20 nt, synthetic construct
  source 1..20: mol_type = other RNA
ggtgttaaaatgttggtatt

SEQ ID NO: 17098 - RNA, 20 nt, synthetic construct
  source 1..20: mol_type = other RNA
ggttagacaacttgctgtaa

SEQ ID NO: 17099 - RNA, 20 nt, synthetic construct
  source 1..20: mol_type = other RNA
ggttaggcaacatctccctt

SEQ ID NO: 17100 - RNA, 20 nt, synthetic construct
  source 1..20: mol_type = other RNA
ggttcatttgtatcacacag

SEQ ID NO: 17101 - RNA, 20 nt, synthetic construct
  source 1..20: mol_type = other RNA
ggttccaccacaaattaagg

SEQ ID NO: 17102 - RNA, 20 nt, synthetic construct
  source 1..20: mol_type = other RNA
ggttctttttggaatgctac

SEQ ID NO: 17103 - RNA, 20 nt, synthetic construct
  source 1..20: mol_type = other RNA
ggttgttgtcattgctgatt

SEQ ID NO: 17104 - RNA, 20 nt, synthetic construct
  source 1..20: mol_type = other RNA
ggtttacaggatgaattctg

SEQ ID NO: 17105 - RNA, 20 nt, synthetic construct
  source 1..20: mol_type = other RNA
ggtttcgcgagacaccaggc

SEQ ID NO: 17106 - RNA, 20 nt, synthetic construct
  source 1..20: mol_type = other RNA
ggtttctcaagcaaaagcta

SEQ ID NO: 17107 - RNA, 20 nt, synthetic construct
  source 1..20: mol_type = other RNA
ggtttgacattttattaatc

SEQ ID NO: 17108 - RNA, 20 nt, synthetic construct
  source 1..20: mol_type = other RNA
ggtttgttggacttagcttt

SEQ ID NO: 17109 - RNA, 20 nt, synthetic construct
  source 1..20: mol_type = other RNA
ggttttctctttttactgag

SEQ ID NO: 17110 - RNA, 20 nt, synthetic construct
  source 1..20: mol_type = other RNA
gtaaaaagagaaaaccatca

SEQ ID NO: 17111 - RNA, 20 nt, synthetic construct
  source 1..20: mol_type = other RNA
gtaaacagtacaagccagta

SEQ ID NO: 17112 - RNA, 20 nt, synthetic construct
  source 1..20: mol_type = other RNA
gtaaaccaggggtgtccaat

SEQ ID NO: 17113 - RNA, 20 nt, synthetic construct
  source 1..20: mol_type = other RNA
gtaaactttcttaaagtttt

SEQ ID NO: 17114 - RNA, 20 nt, synthetic construct
  source 1..20: mol_type = other RNA
gtaaagcagtagtcaagatc

SEQ ID NO: 17115 - RNA, 20 nt, synthetic construct
  source 1..20: mol_type = other RNA
gtaaatggagtgagcgacat

SEQ ID NO: 17116 - RNA, 20 nt, synthetic construct
  source 1..20: mol_type = other RNA
gtaaatgtctttatggtttg

SEQ ID NO: 17117 - RNA, 20 nt, synthetic construct
  source 1..20: mol_type = other RNA
gtaacagtttaatggaatct

SEQ ID NO: 17118 - RNA, 20 nt, synthetic construct
  source 1..20: mol_type = other RNA
gtaactgatctcagatgcct

SEQ ID NO: 17119 - RNA, 20 nt, synthetic construct
  source 1..20: mol_type = other RNA
gtaactgcaattcattccat

SEQ ID NO: 17120 - RNA, 20 nt, synthetic construct
  source 1..20: mol_type = other RNA
gtaagaacagaaatgagagg

SEQ ID NO: 17121 - RNA, 20 nt, synthetic construct
  source 1..20: mol_type = other RNA
gtaagagtcaagccccagct

SEQ ID NO: 17122 - RNA, 20 nt, synthetic construct
  source 1..20: mol_type = other RNA
gtaagatggatcaaaagata

SEQ ID NO: 17123 - RNA, 20 nt, synthetic construct
  source 1..20: mol_type = other RNA
gtaaggaaataaaagctgaa

SEQ ID NO: 17124 - RNA, 20 nt, synthetic construct
  source 1..20: mol_type = other RNA
gtaagttttatcctgaggaa

SEQ ID NO: 17125 - RNA, 20 nt, synthetic construct
  source 1..20: mol_type = other RNA
gtaatccacagaacaagtcc

SEQ ID NO: 17126 - RNA, 20 nt, synthetic construct
  source 1..20: mol_type = other RNA
gtaatggagtttcacctgtc

SEQ ID NO: 17127 - RNA, 20 nt, synthetic construct
  source 1..20: mol_type = other RNA
gtaatgggccagagagcttc

SEQ ID NO: 17128 - RNA, 20 nt, synthetic construct
  source 1..20: mol_type = other RNA
gtaattctggggttgttgtc

SEQ ID NO: 17129 - RNA, 20 nt, synthetic construct
  source 1..20: mol_type = other RNA
gtaatttaaatcagcaatga

SEQ ID NO: 17130 - RNA, 20 nt, synthetic construct
  source 1..20: mol_type = other RNA
gtacaaactgctcaggagtc

SEQ ID NO: 17131 - RNA, 20 nt, synthetic construct
  source 1..20: mol_type = other RNA
gtacaacaaatggaaaatgg

SEQ ID NO: 17132 - RNA, 20 nt, synthetic construct
  source 1..20: mol_type = other RNA
gtacaagacactattccttc

SEQ ID NO: 17133 - RNA, 20 nt, synthetic construct
  source 1..20: mol_type = other RNA
gtacaagccagtaatggagt

SEQ ID NO: 17134 - RNA, 20 nt, synthetic construct
  source 1..20: mol_type = other RNA
gtactcctgagctcctagta

SEQ ID NO: 17135 - RNA, 20 nt, synthetic construct
  source 1..20: mol_type = other RNA
gtactgcgtgggtcatagta

SEQ ID NO: 17136 - RNA, 20 nt, synthetic construct
  source 1..20: mol_type = other RNA
gtactgtttacagcaagttg

SEQ ID NO: 17137 - RNA, 20 nt, synthetic construct
  source 1..20: mol_type = other RNA
gtacttgctcctctagtatt

SEQ ID NO: 17138 - RNA, 20 nt, synthetic construct
  source 1..20: mol_type = other RNA
gtagagagcctggggagaga

SEQ ID NO: 17139 - RNA, 20 nt, synthetic construct
  source 1..20: mol_type = other RNA
gtagcatcaggttaaatctt

SEQ ID NO: 17140 - RNA, 20 nt, synthetic construct
  source 1..20: mol_type = other RNA
gtagcattccaaaaagaacc

SEQ ID NO: 17141 - RNA, 20 nt, synthetic construct
  source 1..20: mol_type = other RNA
gtagccccggacttgttctg

SEQ ID NO: 17142 - RNA, 20 nt, synthetic construct
  source 1..20: mol_type = other RNA
gtagcctggtgtctcgcgaa

SEQ ID NO: 17143 - RNA, 20 nt, synthetic construct
  source 1..20: mol_type = other RNA
gtagctcctgtaacagttta

SEQ ID NO: 17144 - RNA, 20 nt, synthetic construct
  source 1..20: mol_type = other RNA
gtaggacagaaatttaggct

SEQ ID NO: 17145 - RNA, 20 nt, synthetic construct
  source 1..20: mol_type = other RNA
gtagggatgcaaaggggtag

SEQ ID NO: 17146 - RNA, 20 nt, synthetic construct
  source 1..20: mol_type = other RNA
gtagtatgtggaaaatagtg

SEQ ID NO: 17147 - RNA, 20 nt, synthetic construct
  source 1..20: mol_type = other RNA
gtagtcaagatcacctggac

SEQ ID NO: 17148 - RNA, 20 nt, synthetic construct
  source 1..20: mol_type = other RNA
gtataaaactcaggtgatca

SEQ ID NO: 17149 - RNA, 20 nt, synthetic construct
  source 1..20: mol_type = other RNA
gtatactaggagctcaggag

SEQ ID NO: 17150 - RNA, 20 nt, synthetic construct
  source 1..20: mol_type = other RNA
gtatactctgatgtctagcc

SEQ ID NO: 17151 - RNA, 20 nt, synthetic construct
  source 1..20: mol_type = other RNA
gtatagctgtagccccggac

SEQ ID NO: 17152 - RNA, 20 nt, synthetic construct
  source 1..20: mol_type = other RNA
gtatcacacagacctattct

SEQ ID NO: 17153 - RNA, 20 nt, synthetic construct
  source 1..20: mol_type = other RNA
gtatgagtgagagttgctaa

SEQ ID NO: 17154 - RNA, 20 nt, synthetic construct
  source 1..20: mol_type = other RNA
gtatgtggaaaatagtgaaa

SEQ ID NO: 17155 - RNA, 20 nt, synthetic construct
  source 1..20: mol_type = other RNA
gtattagcaatataaaaagc

SEQ ID NO: 17156 - RNA, 20 nt, synthetic construct
  source 1..20: mol_type = other RNA
gtattataattcctcaggat

SEQ ID NO: 17157 - RNA, 20 nt, synthetic construct
  source 1..20: mol_type = other RNA
gtattcagacatagcactag

SEQ ID NO: 17158 - RNA, 20 nt, synthetic construct
  source 1..20: mol_type = other RNA
gtattctgtaatccacagaa

SEQ ID NO: 17159 - RNA, 20 nt, synthetic construct
  source 1..20: mol_type = other RNA
gtatttagaggaagaaaaag

SEQ ID NO: 17160 - RNA, 20 nt, synthetic construct
  source 1..20: mol_type = other RNA
gtcaaaccataaagacattt

SEQ ID NO: 17161 - RNA, 20 nt, synthetic construct
  source 1..20: mol_type = other RNA
gtcaagatcacctggactgt

SEQ ID NO: 17162 - RNA, 20 nt, synthetic construct
  source 1..20: mol_type = other RNA
gtcaagccccagctcaagcc

SEQ ID NO: 17163 - RNA, 20 nt, synthetic construct
  source 1..20: mol_type = other RNA
gtcacatggaatgaattgca

SEQ ID NO: 17164 - RNA, 20 nt, synthetic construct
  source 1..20: mol_type = other RNA
gtcagaagaaaactgctttt

SEQ ID NO: 17165 - RNA, 20 nt, synthetic construct
  source 1..20: mol_type = other RNA
gtcagggacagaatcccagc

SEQ ID NO: 17166 - RNA, 20 nt, synthetic construct
  source 1..20: mol_type = other RNA
gtcataccagccacttttcc

SEQ ID NO: 17167 - RNA, 20 nt, synthetic construct
  source 1..20: mol_type = other RNA
gtcatagaacaacagaccat

SEQ ID NO: 17168 - RNA, 20 nt, synthetic construct
  source 1..20: mol_type = other RNA
gtcatagtaattctggggtt

SEQ ID NO: 17169 - RNA, 20 nt, synthetic construct
  source 1..20: mol_type = other RNA
gtcatatatctttgtggggt

SEQ ID NO: 17170 - RNA, 20 nt, synthetic construct
  source 1..20: mol_type = other RNA
gtcatatttgtgtgtgtagt

SEQ ID NO: 17171 - RNA, 20 nt, synthetic construct
  source 1..20: mol_type = other RNA
gtcatctcccctttggtcat

SEQ ID NO: 17172 - RNA, 20 nt, synthetic construct
  source 1..20: mol_type = other RNA
gtcatgccttccatggtctg

SEQ ID NO: 17173 - RNA, 20 nt, synthetic construct
  source 1..20: mol_type = other RNA
gtcattgctgatttaaatta

SEQ ID NO: 17174 - RNA, 20 nt, synthetic construct
  source 1..20: mol_type = other RNA
gtcattttcatgctctatct

SEQ ID NO: 17175 - RNA, 20 nt, synthetic construct
  source 1..20: mol_type = other RNA
gtccaacaaaccatttttaa

SEQ ID NO: 17176 - RNA, 20 nt, synthetic construct
  source 1..20: mol_type = other RNA
gtccaaggcaggcacatctt

SEQ ID NO: 17177 - RNA, 20 nt, synthetic construct
  source 1..20: mol_type = other RNA
gtccacagttgcaattcaaa

SEQ ID NO: 17178 - RNA, 20 nt, synthetic construct
  source 1..20: mol_type = other RNA
gtccacgtattctgtaatcc

SEQ ID NO: 17179 - RNA, 20 nt, synthetic construct
  source 1..20: mol_type = other RNA
gtccaggtgatcttgactac

SEQ ID NO: 17180 - RNA, 20 nt, synthetic construct
  source 1..20: mol_type = other RNA
gtcccatgcggcccgcgggt

SEQ ID NO: 17181 - RNA, 20 nt, synthetic construct
  source 1..20: mol_type = other RNA
gtccctgaccgtcttcacag

SEQ ID NO: 17182 - RNA, 20 nt, synthetic construct
  source 1..20: mol_type = other RNA
gtccctggatagactttcct

SEQ ID NO: 17183 - RNA, 20 nt, synthetic construct
  source 1..20: mol_type = other RNA
gtccggggctacagctatac

SEQ ID NO: 17184 - RNA, 20 nt, synthetic construct
  source 1..20: mol_type = other RNA
gtcctaaaggaagatagagc

SEQ ID NO: 17185 - RNA, 20 nt, synthetic construct
  source 1..20: mol_type = other RNA
gtcctacaagttttcacttc

SEQ ID NO: 17186 - RNA, 20 nt, synthetic construct
  source 1..20: mol_type = other RNA
gtcctgggtcccatgcggcc

SEQ ID NO: 17187 - RNA, 20 nt, synthetic construct
  source 1..20: mol_type = other RNA
gtcctttatatgtggcccaa

SEQ ID NO: 17188 - RNA, 20 nt, synthetic construct
  source 1..20: mol_type = other RNA
gtcgcattcaaagctgtcct

SEQ ID NO: 17189 - RNA, 20 nt, synthetic construct
  source 1..20: mol_type = other RNA
gtcgctcactccatttactt

SEQ ID NO: 17190 - RNA, 20 nt, synthetic construct
  source 1..20: mol_type = other RNA
gtctaacccgcgggccgcat

SEQ ID NO: 17191 - RNA, 20 nt, synthetic construct
  source 1..20: mol_type = other RNA
gtctagccaactttaagtaa

SEQ ID NO: 17192 - RNA, 20 nt, synthetic construct
  source 1..20: mol_type = other RNA
gtctatccagggaccttatg

SEQ ID NO: 17193 - RNA, 20 nt, synthetic construct
  source 1..20: mol_type = other RNA
gtctcaaatggtataaaact

SEQ ID NO: 17194 - RNA, 20 nt, synthetic construct
  source 1..20: mol_type = other RNA
gtctcgcgaaaccagacaga

SEQ ID NO: 17195 - RNA, 20 nt, synthetic construct
  source 1..20: mol_type = other RNA
gtctctagaaaaatgctcca

SEQ ID NO: 17196 - RNA, 20 nt, synthetic construct
  source 1..20: mol_type = other RNA
gtctctatgatttgggtaac

SEQ ID NO: 17197 - RNA, 20 nt, synthetic construct
  source 1..20: mol_type = other RNA
gtctctgtctttagtgttat

SEQ ID NO: 17198 - RNA, 20 nt, synthetic construct
  source 1..20: mol_type = other RNA
gtctgaatactagaggagca

SEQ ID NO: 17199 - RNA, 20 nt, synthetic construct
  source 1..20: mol_type = other RNA
gtctggtttcgcgagacacc

SEQ ID NO: 17200 - RNA, 20 nt, synthetic construct
  source 1..20: mol_type = other RNA
gtctgtctctagaaaaatgc

SEQ ID NO: 17201 - RNA, 20 nt, synthetic construct
  source 1..20: mol_type = other RNA
gtctgtgtgatacaaatgaa

SEQ ID NO: 17202 - RNA, 20 nt, synthetic construct
  source 1..20: mol_type = other RNA
gtctgttgttctatgaccca

SEQ ID NO: 17203 - RNA, 20 nt, synthetic construct
  source 1..20: mol_type = other RNA
gtcttcacagtccaggtgat

SEQ ID NO: 17204 - RNA, 20 nt, synthetic construct
  source 1..20: mol_type = other RNA
gtcttgggccacatataaag

SEQ ID NO: 17205 - RNA, 20 nt, synthetic construct
  source 1..20: mol_type = other RNA
gtcttgtactcctgagctcc

SEQ ID NO: 17206 - RNA, 20 nt, synthetic construct
  source 1..20: mol_type = other RNA
gtctttagtgttatcttttg

SEQ ID NO: 17207 - RNA, 20 nt, synthetic construct
  source 1..20: mol_type = other RNA
gtctttatggtttgacattt

SEQ ID NO: 17208 - RNA, 20 nt, synthetic construct
  source 1..20: mol_type = other RNA
gtgaaaaatgaaaaagctgt

SEQ ID NO: 17209 - RNA, 20 nt, synthetic construct
  source 1..20: mol_type = other RNA
gtgaaaacttgtaggacaga

SEQ ID NO: 17210 - RNA, 20 nt, synthetic construct
  source 1..20: mol_type = other RNA
gtgaaactccattactggct

SEQ ID NO: 17211 - RNA, 20 nt, synthetic construct
  source 1..20: mol_type = other RNA
gtgaaagcaagcgttaatga

SEQ ID NO: 17212 - RNA, 20 nt, synthetic construct
  source 1..20: mol_type = other RNA
gtgaactagggaggaataaa

SEQ ID NO: 17213 - RNA, 20 nt, synthetic construct
  source 1..20: mol_type = other RNA
gtgaagacggtcagggacag

SEQ ID NO: 17214 - RNA, 20 nt, synthetic construct
  source 1..20: mol_type = other RNA
gtgaatgtgatgcataaggt

SEQ ID NO: 17215 - RNA, 20 nt, synthetic construct
  source 1..20: mol_type = other RNA
gtgacttcaggagagaggtc

SEQ ID NO: 17216 - RNA, 20 nt, synthetic construct
  source 1..20: mol_type = other RNA
gtgagagttgctaagatgcc

SEQ ID NO: 17217 - RNA, 20 nt, synthetic construct
  source 1..20: mol_type = other RNA
gtgagattccattaaactgt

SEQ ID NO: 17218 - RNA, 20 nt, synthetic construct
  source 1..20: mol_type = other RNA
gtgagcgacatgtaaatgtc

SEQ ID NO: 17219 - RNA, 20 nt, synthetic construct
  source 1..20: mol_type = other RNA
gtgagggagggaagcactgg

SEQ ID NO: 17220 - RNA, 20 nt, synthetic construct
  source 1..20: mol_type = other RNA
gtgatacaaatgaacccagc

SEQ ID NO: 17221 - RNA, 20 nt, synthetic construct
  source 1..20: mol_type = other RNA
gtgatagcttccaaattgct

SEQ ID NO: 17222 - RNA, 20 nt, synthetic construct
  source 1..20: mol_type = other RNA
gtgatcatgctttatgtctg

SEQ ID NO: 17223 - RNA, 20 nt, synthetic construct
  source 1..20: mol_type = other RNA
gtgatcttgactactgcttt

SEQ ID NO: 17224 - RNA, 20 nt, synthetic construct
  source 1..20: mol_type = other RNA
gtgatgcataaggtccctgg

SEQ ID NO: 17225 - RNA, 20 nt, synthetic construct
  source 1..20: mol_type = other RNA
gtgattgttttctataactc

SEQ ID NO: 17226 - RNA, 20 nt, synthetic construct
  source 1..20: mol_type = other RNA
gtgcagcaagggtctcaaat

SEQ ID NO: 17227 - RNA, 20 nt, synthetic construct
  source 1..20: mol_type = other RNA
gtgcctgccttggacaacag

SEQ ID NO: 17228 - RNA, 20 nt, synthetic construct
  source 1..20: mol_type = other RNA
gtgctatgtctgaatactag

SEQ ID NO: 17229 - RNA, 20 nt, synthetic construct
  source 1..20: mol_type = other RNA
gtgcttccctccctcaccct

SEQ ID NO: 17230 - RNA, 20 nt, synthetic construct
  source 1..20: mol_type = other RNA
gtgcttttattcctccctag

SEQ ID NO: 17231 - RNA, 20 nt, synthetic construct
  source 1..20: mol_type = other RNA
gtggaaaatagtgaaaaatg

SEQ ID NO: 17232 - RNA, 20 nt, synthetic construct
  source 1..20: mol_type = other RNA
gtggaaccaatctgtctggt

SEQ ID NO: 17233 - RNA, 20 nt, synthetic construct
  source 1..20: mol_type = other RNA
gtggacagtatagctgtagc

SEQ ID NO: 17234 - RNA, 20 nt, synthetic construct
  source 1..20: mol_type = other RNA
gtggacattgatggttttct

SEQ ID NO: 17235 - RNA, 20 nt, synthetic construct
  source 1..20: mol_type = other RNA
gtggattacagaatacgtgg

SEQ ID NO: 17236 - RNA, 20 nt, synthetic construct
  source 1..20: mol_type = other RNA
gtggcccaagacagttcttg

SEQ ID NO: 17237 - RNA, 20 nt, synthetic construct
  source 1..20: mol_type = other RNA
gtggctggtatgactaaaga

SEQ ID NO: 17238 - RNA, 20 nt, synthetic construct
  source 1..20: mol_type = other RNA
gtggggtggttctttttgga

SEQ ID NO: 17239 - RNA, 20 nt, synthetic construct
  source 1..20: mol_type = other RNA
gtgggtcatagtaattctgg

SEQ ID NO: 17240 - RNA, 20 nt, synthetic construct
  source 1..20: mol_type = other RNA
gtggtgcagcaagggtctca

SEQ ID NO: 17241 - RNA, 20 nt, synthetic construct
  source 1..20: mol_type = other RNA
gtggtggaaccaatctgtct

SEQ ID NO: 17242 - RNA, 20 nt, synthetic construct
  source 1..20: mol_type = other RNA
gtggttctttttggaatgct

SEQ ID NO: 17243 - RNA, 20 nt, synthetic construct
  source 1..20: mol_type = other RNA
gtgtagcatcaggttaaatc

SEQ ID NO: 17244 - RNA, 20 nt, synthetic construct
  source 1..20: mol_type = other RNA
gtgtagtatgtggaaaatag

SEQ ID NO: 17245 - RNA, 20 nt, synthetic construct
  source 1..20: mol_type = other RNA
gtgtctcgcgaaaccagaca

SEQ ID NO: 17246 - RNA, 20 nt, synthetic construct
  source 1..20: mol_type = other RNA
gtgtcttgtactcctgagct

SEQ ID NO: 17247 - RNA, 20 nt, synthetic construct
  source 1..20: mol_type = other RNA
gtgtgatacaaatgaaccca

SEQ ID NO: 17248 - RNA, 20 nt, synthetic construct
  source 1..20: mol_type = other RNA
gtgtgatagcttccaaattg

SEQ ID NO: 17249 - RNA, 20 nt, synthetic construct
  source 1..20: mol_type = other RNA
gtgtgtagtatgtggaaaat

SEQ ID NO: 17250 - RNA, 20 nt, synthetic construct
  source 1..20: mol_type = other RNA
gtgtgtgtagtatgtggaaa

SEQ ID NO: 17251 - RNA, 20 nt, synthetic construct
  source 1..20: mol_type = other RNA
gtgttaaaatgttggtatta

SEQ ID NO: 17252 - RNA, 20 nt, synthetic construct
  source 1..20: mol_type = other RNA
gtgttatcttttgatccatc

SEQ ID NO: 17253 - RNA, 20 nt, synthetic construct
  source 1..20: mol_type = other RNA
gtgtttccaggaagtgaaaa

SEQ ID NO: 17254 - RNA, 20 nt, synthetic construct
  source 1..20: mol_type = other RNA
gttaaaatgttggtattata

SEQ ID NO: 17255 - RNA, 20 nt, synthetic construct
  source 1..20: mol_type = other RNA
gttaaatatatcagaacttg

SEQ ID NO: 17256 - RNA, 20 nt, synthetic construct
  source 1..20: mol_type = other RNA
gttaaatgaaatgtaatggg

SEQ ID NO: 17257 - RNA, 20 nt, synthetic construct
  source 1..20: mol_type = other RNA
gttaaattgaggaaagtcta

SEQ ID NO: 17258 - RNA, 20 nt, synthetic construct
  source 1..20: mol_type = other RNA
gttaaggtaatttaaatcag

SEQ ID NO: 17259 - RNA, 20 nt, synthetic construct
  source 1..20: mol_type = other RNA
gttacaggagctacatagtt

SEQ ID NO: 17260 - RNA, 20 nt, synthetic construct
  source 1..20: mol_type = other RNA
gttacccaaatcatagagac

SEQ ID NO: 17261 - RNA, 20 nt, synthetic construct
  source 1..20: mol_type = other RNA
gttactaactggtaagaaca

SEQ ID NO: 17262 - RNA, 20 nt, synthetic construct
  source 1..20: mol_type = other RNA
gttagacaacttgctgtaaa

SEQ ID NO: 17263 - RNA, 20 nt, synthetic construct
  source 1..20: mol_type = other RNA
gttaggatgattgtcctaaa

SEQ ID NO: 17264 - RNA, 20 nt, synthetic construct
  source 1..20: mol_type = other RNA
gttaggcaacatctcccttt

SEQ ID NO: 17265 - RNA, 20 nt, synthetic construct
  source 1..20: mol_type = other RNA
gttagtaactgatctcagat

SEQ ID NO: 17266 - RNA, 20 nt, synthetic construct
  source 1..20: mol_type = other RNA
gttatagaaaacaatcacaa

SEQ ID NO: 17267 - RNA, 20 nt, synthetic construct
  source 1..20: mol_type = other RNA
gttatcttttgatccatctt

SEQ ID NO: 17268 - RNA, 20 nt, synthetic construct
  source 1..20: mol_type = other RNA
gttcacgttcttaaatgttt

SEQ ID NO: 17269 - RNA, 20 nt, synthetic construct
  source 1..20: mol_type = other RNA
gttcatttgtatcacacaga

SEQ ID NO: 17270 - RNA, 20 nt, synthetic construct
  source 1..20: mol_type = other RNA
gttccaccacaaattaaggc

SEQ ID NO: 17271 - RNA, 20 nt, synthetic construct
  source 1..20: mol_type = other RNA
gttctatgacccaaactgcc

SEQ ID NO: 17272 - RNA, 20 nt, synthetic construct
  source 1..20: mol_type = other RNA
gttctcgtgaatgtgatgca

SEQ ID NO: 17273 - RNA, 20 nt, synthetic construct
  source 1..20: mol_type = other RNA
gttctgatatatttaactat

SEQ ID NO: 17274 - RNA, 20 nt, synthetic construct
  source 1..20: mol_type = other RNA
gttctgtggattacagaata

SEQ ID NO: 17275 - RNA, 20 nt, synthetic construct
  source 1..20: mol_type = other RNA
gttcttaccagttagtaact

SEQ ID NO: 17276 - RNA, 20 nt, synthetic construct
  source 1..20: mol_type = other RNA
gttcttgcagtgtggcccag

SEQ ID NO: 17277 - RNA, 20 nt, synthetic construct
  source 1..20: mol_type = other RNA
gttctttagtcataccagcc

SEQ ID NO: 17278 - RNA, 20 nt, synthetic construct
  source 1..20: mol_type = other RNA
gttctttttggaatgctacc

SEQ ID NO: 17279 - RNA, 20 nt, synthetic construct
  source 1..20: mol_type = other RNA
gttgcctaacctcagatcca

SEQ ID NO: 17280 - RNA, 20 nt, synthetic construct
  source 1..20: mol_type = other RNA
gttgctaagatgcctggtag

SEQ ID NO: 17281 - RNA, 20 nt, synthetic construct
  source 1..20: mol_type = other RNA
gttggacttagctttcagct

SEQ ID NO: 17282 - RNA, 20 nt, synthetic construct
  source 1..20: mol_type = other RNA
gttggctagacatcagagta

SEQ ID NO: 17283 - RNA, 20 nt, synthetic construct
  source 1..20: mol_type = other RNA
gttggtattataattcctca

SEQ ID NO: 17284 - RNA, 20 nt, synthetic construct
  source 1..20: mol_type = other RNA
gttgtacttgctcctctagt

SEQ ID NO: 17285 - RNA, 20 nt, synthetic construct
  source 1..20: mol_type = other RNA
gttgtcattgctgatttaaa

SEQ ID NO: 17286 - RNA, 20 nt, synthetic construct
  source 1..20: mol_type = other RNA
gttgtccaaggcaggcacat

SEQ ID NO: 17287 - RNA, 20 nt, synthetic construct
  source 1..20: mol_type = other RNA
gttgtctaacccgcgggccg

SEQ ID NO: 17288 - RNA, 20 nt, synthetic construct
  source 1..20: mol_type = other RNA
gttgttctatgacccaaact

SEQ ID NO: 17289 - RNA, 20 nt, synthetic construct
  source 1..20: mol_type = other RNA
gttgttgtcattgctgattt

SEQ ID NO: 17290 - RNA, 20 nt, synthetic construct
  source 1..20: mol_type = other RNA
gtttaatggaatctcacctc

SEQ ID NO: 17291 - RNA, 20 nt, synthetic construct
  source 1..20: mol_type = other RNA
gtttacagcaagttgtctaa

SEQ ID NO: 17292 - RNA, 20 nt, synthetic construct
  source 1..20: mol_type = other RNA
gtttacaggatgaattctgt

SEQ ID NO: 17293 - RNA, 20 nt, synthetic construct
  source 1..20: mol_type = other RNA
gtttcacctgtcattttcat

SEQ ID NO: 17294 - RNA, 20 nt, synthetic construct
  source 1..20: mol_type = other RNA
gtttccaggaagtgaaaact

SEQ ID NO: 17295 - RNA, 20 nt, synthetic construct
  source 1..20: mol_type = other RNA
gtttcgcgagacaccaggct

SEQ ID NO: 17296 - RNA, 20 nt, synthetic construct
  source 1..20: mol_type = other RNA
gtttctcaagcaaaagctaa

SEQ ID NO: 17297 - RNA, 20 nt, synthetic construct
  source 1..20: mol_type = other RNA
gtttgacattttattaatct

SEQ ID NO: 17298 - RNA, 20 nt, synthetic construct
  source 1..20: mol_type = other RNA
gtttgggtcatagaacaaca

SEQ ID NO: 17299 - RNA, 20 nt, synthetic construct
  source 1..20: mol_type = other RNA
gtttgtactgcgtgggtcat

SEQ ID NO: 17300 - RNA, 20 nt, synthetic construct
  source 1..20: mol_type = other RNA
gtttgttggacttagctttc

SEQ ID NO: 17301 - RNA, 20 nt, synthetic construct
  source 1..20: mol_type = other RNA
gttttataccatttgagacc

SEQ ID NO: 17302 - RNA, 20 nt, synthetic construct
  source 1..20: mol_type = other RNA
gttttatcctgaggaattat

SEQ ID NO: 17303 - RNA, 20 nt, synthetic construct
  source 1..20: mol_type = other RNA
gttttcacttcctggaaaca

SEQ ID NO: 17304 - RNA, 20 nt, synthetic construct
  source 1..20: mol_type = other RNA
gttttctataactcaagata

SEQ ID NO: 17305 - RNA, 20 nt, synthetic construct
  source 1..20: mol_type = other RNA
gttttctctttttactgagc

SEQ ID NO: 17306 - RNA, 20 nt, synthetic construct
  source 1..20: mol_type = other RNA
gttttcttctgactcctgag

SEQ ID NO: 17307 - RNA, 20 nt, synthetic construct
  source 1..20: mol_type = other RNA
taaaaaagcagttttcttct

SEQ ID NO: 17308 - RNA, 20 nt, synthetic construct
  source 1..20: mol_type = other RNA
taaaaagagaaaaccatcaa

SEQ ID NO: 17309 - RNA, 20 nt, synthetic construct
  source 1..20: mol_type = other RNA
taaaaagcatttggtgttaa

SEQ ID NO: 17310 - RNA, 20 nt, synthetic construct
  source 1..20: mol_type = other RNA
taaaaatggtttgttggact

SEQ ID NO: 17311 - RNA, 20 nt, synthetic construct
  source 1..20: mol_type = other RNA
taaaaattcagttctttagt

SEQ ID NO: 17312 - RNA, 20 nt, synthetic construct
  source 1..20: mol_type = other RNA
taaaactcaggtgatcatgc

SEQ ID NO: 17313 - RNA, 20 nt, synthetic construct
  source 1..20: mol_type = other RNA
taaaagcactgctgggtaag

SEQ ID NO: 17314 - RNA, 20 nt, synthetic construct
  source 1..20: mol_type = other RNA
taaaagcagcaagggtagca

SEQ ID NO: 17315 - RNA, 20 nt, synthetic construct
  source 1..20: mol_type = other RNA
taaaagctgaagctctctgg

SEQ ID NO: 17316 - RNA, 20 nt, synthetic construct
  source 1..20: mol_type = other RNA
taaaagggcagtttgggtca

SEQ ID NO: 17317 - RNA, 20 nt, synthetic construct
  source 1..20: mol_type = other RNA
taaaatgtcaaaccataaag

SEQ ID NO: 17318 - RNA, 20 nt, synthetic construct
  source 1..20: mol_type = other RNA
taaaatgttggtattataat

SEQ ID NO: 17319 - RNA, 20 nt, synthetic construct
  source 1..20: mol_type = other RNA
taaacagtacaagccagtaa

SEQ ID NO: 17320 - RNA, 20 nt, synthetic construct
  source 1..20: mol_type = other RNA
taaacatttaagaacgtgaa

SEQ ID NO: 17321 - RNA, 20 nt, synthetic construct
  source 1..20: mol_type = other RNA
taaaccaggggtgtccaatc

SEQ ID NO: 17322 - RNA, 20 nt, synthetic construct
  source 1..20: mol_type = other RNA
taaactgttacaggagctac

SEQ ID NO: 17323 - RNA, 20 nt, synthetic construct
  source 1..20: mol_type = other RNA
taaagacagagacagcaatt

SEQ ID NO: 17324 - RNA, 20 nt, synthetic construct
  source 1..20: mol_type = other RNA
taaagacatttacatgtcgc

SEQ ID NO: 17325 - RNA, 20 nt, synthetic construct
  source 1..20: mol_type = other RNA
taaagatgtgcctgccttgg

SEQ ID NO: 17326 - RNA, 20 nt, synthetic construct
  source 1..20: mol_type = other RNA
taaagcagtagtcaagatca

SEQ ID NO: 17327 - RNA, 20 nt, synthetic construct
  source 1..20: mol_type = other RNA
taaagcatgatcacctgagt

SEQ ID NO: 17328 - RNA, 20 nt, synthetic construct
  source 1..20: mol_type = other RNA
taaaggaagatagagcatga

SEQ ID NO: 17329 - RNA, 20 nt, synthetic construct
  source 1..20: mol_type = other RNA
taaagttggctagacatcag

SEQ ID NO: 17330 - RNA, 20 nt, synthetic construct
  source 1..20: mol_type = other RNA
taaatacctctcatttctgt

SEQ ID NO: 17331 - RNA, 20 nt, synthetic construct
  source 1..20: mol_type = other RNA
taaatcagcaatgacaacaa

SEQ ID NO: 17332 - RNA, 20 nt, synthetic construct
  source 1..20: mol_type = other RNA
taaatgaaatgtaatgggcc

SEQ ID NO: 17333 - RNA, 20 nt, synthetic construct
  source 1..20: mol_type = other RNA
taaatggagtgagcgacatg

SEQ ID NO: 17334 - RNA, 20 nt, synthetic construct
  source 1..20: mol_type = other RNA
taaattaccttaactattct

SEQ ID NO: 17335 - RNA, 20 nt, synthetic construct
  source 1..20: mol_type = other RNA
taaattgaggaaagtctatc

SEQ ID NO: 17336 - RNA, 20 nt, synthetic construct
  source 1..20: mol_type = other RNA
taaatttctgtcctacaagt

SEQ ID NO: 17337 - RNA, 20 nt, synthetic construct
  source 1..20: mol_type = other RNA
taacaagatgtaagatggat

SEQ ID NO: 17338 - RNA, 20 nt, synthetic construct
  source 1..20: mol_type = other RNA
taacaccaaatgctttttat

SEQ ID NO: 17339 - RNA, 20 nt, synthetic construct
  source 1..20: mol_type = other RNA
taacactaaagacagagaca

SEQ ID NO: 17340 - RNA, 20 nt, synthetic construct
  source 1..20: mol_type = other RNA
taacagtttaatggaatctc

SEQ ID NO: 17341 - RNA, 20 nt, synthetic construct
  source 1..20: mol_type = other RNA
taacccgcgggccgcatggg

SEQ ID NO: 17342 - RNA, 20 nt, synthetic construct
  source 1..20: mol_type = other RNA
taacctcagatccaattctc

SEQ ID NO: 17343 - RNA, 20 nt, synthetic construct
  source 1..20: mol_type = other RNA
taacctgatgctacactttg

SEQ ID NO: 17344 - RNA, 20 nt, synthetic construct
  source 1..20: mol_type = other RNA
taacgcttgctttcactgtt

SEQ ID NO: 17345 - RNA, 20 nt, synthetic construct
  source 1..20: mol_type = other RNA
taactatgtagctcctgtaa

SEQ ID NO: 17346 - RNA, 20 nt, synthetic construct
  source 1..20: mol_type = other RNA
taactattctgagctttttg

SEQ ID NO: 17347 - RNA, 20 nt, synthetic construct
  source 1..20: mol_type = other RNA
taactcaagatatgatgctt

SEQ ID NO: 17348 - RNA, 20 nt, synthetic construct
  source 1..20: mol_type = other RNA
taactgatctcagatgcctg

SEQ ID NO: 17349 - RNA, 20 nt, synthetic construct
  source 1..20: mol_type = other RNA
taactgcaattcattccatg

SEQ ID NO: 17350 - RNA, 20 nt, synthetic construct
  source 1..20: mol_type = other RNA
taactggtaagaacagaaat

SEQ ID NO: 17351 - RNA, 20 nt, synthetic construct
  source 1..20: mol_type = other RNA
taagaacagaaatgagaggt

SEQ ID NO: 17352 - RNA, 20 nt, synthetic construct
  source 1..20: mol_type = other RNA
taagaacgtgaactagggag

SEQ ID NO: 17353 - RNA, 20 nt, synthetic construct
  source 1..20: mol_type = other RNA
taagagtcaagccccagctc

SEQ ID NO: 17354 - RNA, 20 nt, synthetic construct
  source 1..20: mol_type = other RNA
taagatgcctggtagggatg

SEQ ID NO: 17355 - RNA, 20 nt, synthetic construct
  source 1..20: mol_type = other RNA
taagatggatcaaaagataa

SEQ ID NO: 17356 - RNA, 20 nt, synthetic construct
  source 1..20: mol_type = other RNA
taagatttaacctgatgcta

SEQ ID NO: 17357 - RNA, 20 nt, synthetic construct
  source 1..20: mol_type = other RNA
taagcatcatatcttgagtt

SEQ ID NO: 17358 - RNA, 20 nt, synthetic construct
  source 1..20: mol_type = other RNA
taaggaaataaaagctgaag

SEQ ID NO: 17359 - RNA, 20 nt, synthetic construct
  source 1..20: mol_type = other RNA
taaggcttgagctggggctt

SEQ ID NO: 17360 - RNA, 20 nt, synthetic construct
  source 1..20: mol_type = other RNA
taaggtaatttaaatcagca

SEQ ID NO: 17361 - RNA, 20 nt, synthetic construct
  source 1..20: mol_type = other RNA
taaggtccctggatagactt

SEQ ID NO: 17362 - RNA, 20 nt, synthetic construct
  source 1..20: mol_type = other RNA
taagtaaatggagtgagcga

SEQ ID NO: 17363 - RNA, 20 nt, synthetic construct
  source 1..20: mol_type = other RNA
taagtagtgataatccgcag

SEQ ID NO: 17364 - RNA, 20 nt, synthetic construct
  source 1..20: mol_type = other RNA
taagtccaacaaaccatttt

SEQ ID NO: 17365 - RNA, 20 nt, synthetic construct
  source 1..20: mol_type = other RNA
taagttttatcctgaggaat

SEQ ID NO: 17366 - RNA, 20 nt, synthetic construct
  source 1..20: mol_type = other RNA
taataccaacattttaacac

SEQ ID NO: 17367 - RNA, 20 nt, synthetic construct
  source 1..20: mol_type = other RNA
taatccacagaacaagtccg

SEQ ID NO: 17368 - RNA, 20 nt, synthetic construct
  source 1..20: mol_type = other RNA
taatcctgcagattcaaatg

SEQ ID NO: 17369 - RNA, 20 nt, synthetic construct
  source 1..20: mol_type = other RNA
taatcttgagcattggaaaa

SEQ ID NO: 17370 - RNA, 20 nt, synthetic construct
  source 1..20: mol_type = other RNA
taatgaattttagggaggtg

SEQ ID NO: 17371 - RNA, 20 nt, synthetic construct
  source 1..20: mol_type = other RNA
taatggaatctcacctccct

SEQ ID NO: 17372 - RNA, 20 nt, synthetic construct
  source 1..20: mol_type = other RNA
taatggagtttcacctgtca

SEQ ID NO: 17373 - RNA, 20 nt, synthetic construct
  source 1..20: mol_type = other RNA
taatgggccagagagcttca

SEQ ID NO: 17374 - RNA, 20 nt, synthetic construct
  source 1..20: mol_type = other RNA
taattcctcaggataaaact

SEQ ID NO: 17375 - RNA, 20 nt, synthetic construct
  source 1..20: mol_type = other RNA
taattctggggttgttgtca

SEQ ID NO: 17376 - RNA, 20 nt, synthetic construct
  source 1..20: mol_type = other RNA
taatttaaatcagcaatgac

SEQ ID NO: 17377 - RNA, 20 nt, synthetic construct
  source 1..20: mol_type = other RNA
taatttgaattgcaactgtg

SEQ ID NO: 17378 - RNA, 20 nt, synthetic construct
  source 1..20: mol_type = other RNA
taatttgtggtggaaccaat

SEQ ID NO: 17379 - RNA, 20 nt, synthetic construct
  source 1..20: mol_type = other RNA
tacaaactgctcaggagtca

SEQ ID NO: 17380 - RNA, 20 nt, synthetic construct
  source 1..20: mol_type = other RNA
tacaaatgaacccagcctaa

SEQ ID NO: 17381 - RNA, 20 nt, synthetic construct
  source 1..20: mol_type = other RNA
tacaacaaatggaaaatggg

SEQ ID NO: 17382 - RNA, 20 nt, synthetic construct
  source 1..20: mol_type = other RNA
tacaagacactattccttca

SEQ ID NO: 17383 - RNA, 20 nt, synthetic construct
  source 1..20: mol_type = other RNA
tacaagccagtaatggagtt

SEQ ID NO: 17384 - RNA, 20 nt, synthetic construct
  source 1..20: mol_type = other RNA
tacaagttttcacttcctgg

SEQ ID NO: 17385 - RNA, 20 nt, synthetic construct
  source 1..20: mol_type = other RNA
tacacacacaaatatgacct

SEQ ID NO: 17386 - RNA, 20 nt, synthetic construct
  source 1..20: mol_type = other RNA
tacactttggtggtgcagca

SEQ ID NO: 17387 - RNA, 20 nt, synthetic construct
  source 1..20: mol_type = other RNA
tacagaatacgtggacattg

SEQ ID NO: 17388 - RNA, 20 nt, synthetic construct
  source 1..20: mol_type = other RNA
tacagagaattggatctgag

SEQ ID NO: 17389 - RNA, 20 nt, synthetic construct
  source 1..20: mol_type = other RNA
tacagcaagttgtctaaccc

SEQ ID NO: 17390 - RNA, 20 nt, synthetic construct
  source 1..20: mol_type = other RNA
tacagctatactgtccacag

SEQ ID NO: 17391 - RNA, 20 nt, synthetic construct
  source 1..20: mol_type = other RNA
tacaggagctacatagttaa

SEQ ID NO: 17392 - RNA, 20 nt, synthetic construct
  source 1..20: mol_type = other RNA
tacaggatgaattctgttct

SEQ ID NO: 17393 - RNA, 20 nt, synthetic construct
  source 1..20: mol_type = other RNA
tacatcttgttaggatgatt

SEQ ID NO: 17394 - RNA, 20 nt, synthetic construct
  source 1..20: mol_type = other RNA
tacatgtcgctcactccatt

SEQ ID NO: 17395 - RNA, 20 nt, synthetic construct
  source 1..20: mol_type = other RNA
tacatttcatttaactgctt

SEQ ID NO: 17396 - RNA, 20 nt, synthetic construct
  source 1..20: mol_type = other RNA
taccaacattttaacaccaa

SEQ ID NO: 17397 - RNA, 20 nt, synthetic construct
  source 1..20: mol_type = other RNA
taccagccacttttccaatg

SEQ ID NO: 17398 - RNA, 20 nt, synthetic construct
  source 1..20: mol_type = other RNA
taccaggcatcttagcaact

SEQ ID NO: 17399 - RNA, 20 nt, synthetic construct
  source 1..20: mol_type = other RNA
taccagttagtaactgatct

SEQ ID NO: 17400 - RNA, 20 nt, synthetic construct
  source 1..20: mol_type = other RNA
taccatttgagacccttgct

SEQ ID NO: 17401 - RNA, 20 nt, synthetic construct
  source 1..20: mol_type = other RNA
tacccaaatcatagagacgt

SEQ ID NO: 17402 - RNA, 20 nt, synthetic construct
  source 1..20: mol_type = other RNA
tacccaagatcaagagaggg

SEQ ID NO: 17403 - RNA, 20 nt, synthetic construct
  source 1..20: mol_type = other RNA
tacccagcagtgcttttatt

SEQ ID NO: 17404 - RNA, 20 nt, synthetic construct
  source 1..20: mol_type = other RNA
tacccctttgcatccctacc

SEQ ID NO: 17405 - RNA, 20 nt, synthetic construct
  source 1..20: mol_type = other RNA
tacccttgctgcttttaatc

SEQ ID NO: 17406 - RNA, 20 nt, synthetic construct
  source 1..20: mol_type = other RNA
tacctctcatttctgttctt

SEQ ID NO: 17407 - RNA, 20 nt, synthetic construct
  source 1..20: mol_type = other RNA
taccttaactattctgagct

SEQ ID NO: 17408 - RNA, 20 nt, synthetic construct
  source 1..20: mol_type = other RNA
tacgtggacattgatggttt

SEQ ID NO: 17409 - RNA, 20 nt, synthetic construct
  source 1..20: mol_type = other RNA
tactaactggtaagaacaga

SEQ ID NO: 17410 - RNA, 20 nt, synthetic construct
  source 1..20: mol_type = other RNA
tactacacacacaaatatga

SEQ ID NO: 17411 - RNA, 20 nt, synthetic construct
  source 1..20: mol_type = other RNA
tactagaggagcaagtacaa

SEQ ID NO: 17412 - RNA, 20 nt, synthetic construct
  source 1..20: mol_type = other RNA
tactaggagctcaggagtac

SEQ ID NO: 17413 - RNA, 20 nt, synthetic construct
  source 1..20: mol_type = other RNA
tactatgacccacgcagtac

SEQ ID NO: 17414 - RNA, 20 nt, synthetic construct
  source 1..20: mol_type = other RNA
tactcctgagctcctagtat

SEQ ID NO: 17415 - RNA, 20 nt, synthetic construct
  source 1..20: mol_type = other RNA
tactctgatgtctagccaac

SEQ ID NO: 17416 - RNA, 20 nt, synthetic construct
  source 1..20: mol_type = other RNA
tactgagcagtaaggaaata

SEQ ID NO: 17417 - RNA, 20 nt, synthetic construct
  source 1..20: mol_type = other RNA
tactgcgtgggtcatagtaa

SEQ ID NO: 17418 - RNA, 20 nt, synthetic construct
  source 1..20: mol_type = other RNA
tactgctcagtaaaaagaga

SEQ ID NO: 17419 - RNA, 20 nt, synthetic construct
  source 1..20: mol_type = other RNA
tactgctttacagagaattg

SEQ ID NO: 17420 - RNA, 20 nt, synthetic construct
  source 1..20: mol_type = other RNA
tactggcttgtactgtttac

SEQ ID NO: 17421 - RNA, 20 nt, synthetic construct
  source 1..20: mol_type = other RNA
tactgtccacagttgcaatt

SEQ ID NO: 17422 - RNA, 20 nt, synthetic construct
  source 1..20: mol_type = other RNA
tactgtttacagcaagttgt

SEQ ID NO: 17423 - RNA, 20 nt, synthetic construct
  source 1..20: mol_type = other RNA
tacttaaagttggctagaca

SEQ ID NO: 17424 - RNA, 20 nt, synthetic construct
  source 1..20: mol_type = other RNA
tacttatcatttttggagca

SEQ ID NO: 17425 - RNA, 20 nt, synthetic construct
  source 1..20: mol_type = other RNA
tacttgatcccattttccat

SEQ ID NO: 17426 - RNA, 20 nt, synthetic construct
  source 1..20: mol_type = other RNA
tacttgctcctctagtattc

SEQ ID NO: 17427 - RNA, 20 nt, synthetic construct
  source 1..20: mol_type = other RNA
tactttgtgattgttttcta

SEQ ID NO: 17428 - RNA, 20 nt, synthetic construct
  source 1..20: mol_type = other RNA
tagaaaaatgctccaaaaat

SEQ ID NO: 17429 - RNA, 20 nt, synthetic construct
  source 1..20: mol_type = other RNA
tagaaaaattttagcttttg

SEQ ID NO: 17430 - RNA, 20 nt, synthetic construct
  source 1..20: mol_type = other RNA
tagaacaacagaccatggaa

SEQ ID NO: 17431 - RNA, 20 nt, synthetic construct
  source 1..20: mol_type = other RNA
tagacaacttgctgtaaaca

SEQ ID NO: 17432 - RNA, 20 nt, synthetic construct
  source 1..20: mol_type = other RNA
tagacatcagagtatactag

SEQ ID NO: 17433 - RNA, 20 nt, synthetic construct
  source 1..20: mol_type = other RNA
tagactttcctcaatttaac

SEQ ID NO: 17434 - RNA, 20 nt, synthetic construct
  source 1..20: mol_type = other RNA
tagagacagacataaagcat

SEQ ID NO: 17435 - RNA, 20 nt, synthetic construct
  source 1..20: mol_type = other RNA
tagagacgtcatatatcttt

SEQ ID NO: 17436 - RNA, 20 nt, synthetic construct
  source 1..20: mol_type = other RNA
tagagagcctggggagagag

SEQ ID NO: 17437 - RNA, 20 nt, synthetic construct
  source 1..20: mol_type = other RNA
tagagcatgaaaatgacagg

SEQ ID NO: 17438 - RNA, 20 nt, synthetic construct
  source 1..20: mol_type = other RNA
tagagctcctccaatcaagt

SEQ ID NO: 17439 - RNA, 20 nt, synthetic construct
  source 1..20: mol_type = other RNA
tagaggaagaaaaagggaga

SEQ ID NO: 17440 - RNA, 20 nt, synthetic construct
  source 1..20: mol_type = other RNA
tagaggagcaagtacaacaa

SEQ ID NO: 17441 - RNA, 20 nt, synthetic construct
  source 1..20: mol_type = other RNA
tagcaactctcactcatact

SEQ ID NO: 17442 - RNA, 20 nt, synthetic construct
  source 1..20: mol_type = other RNA
tagcaatataaaaagcattt

SEQ ID NO: 17443 - RNA, 20 nt, synthetic construct
  source 1..20: mol_type = other RNA
tagcactagctttctccctc

SEQ ID NO: 17444 - RNA, 20 nt, synthetic construct
  source 1..20: mol_type = other RNA
tagcatcaggttaaatctta

SEQ ID NO: 17445 - RNA, 20 nt, synthetic construct
  source 1..20: mol_type = other RNA
tagcattccaaaaagaacca

SEQ ID NO: 17446 - RNA, 20 nt, synthetic construct
  source 1..20: mol_type = other RNA
tagccaactttaagtaaatg

SEQ ID NO: 17447 - RNA, 20 nt, synthetic construct
  source 1..20: mol_type = other RNA
tagccccggacttgttctgt

SEQ ID NO: 17448 - RNA, 20 nt, synthetic construct
  source 1..20: mol_type = other RNA
tagcctggtgtctcgcgaaa

SEQ ID NO: 17449 - RNA, 20 nt, synthetic construct
  source 1..20: mol_type = other RNA
tagctcctgtaacagtttaa

SEQ ID NO: 17450 - RNA, 20 nt, synthetic construct
  source 1..20: mol_type = other RNA
tagctgaaagctaagtccaa

SEQ ID NO: 17451 - RNA, 20 nt, synthetic construct
  source 1..20: mol_type = other RNA
tagctgggattctgtccctg

SEQ ID NO: 17452 - RNA, 20 nt, synthetic construct
  source 1..20: mol_type = other RNA
tagctgtagccccggacttg

SEQ ID NO: 17453 - RNA, 20 nt, synthetic construct
  source 1..20: mol_type = other RNA
tagcttccaaattgctgtct

SEQ ID NO: 17454 - RNA, 20 nt, synthetic construct
  source 1..20: mol_type = other RNA
tagctttctccctctcttga

SEQ ID NO: 17455 - RNA, 20 nt, synthetic construct
  source 1..20: mol_type = other RNA
tagcttttgcttgagaaacc

SEQ ID NO: 17456 - RNA, 20 nt, synthetic construct
  source 1..20: mol_type = other RNA
taggacaatcatcctaacaa

SEQ ID NO: 17457 - RNA, 20 nt, synthetic construct
  source 1..20: mol_type = other RNA
taggacagaaatttaggctg

SEQ ID NO: 17458 - RNA, 20 nt, synthetic construct
  source 1..20: mol_type = other RNA
taggagctcaggagtacaag

SEQ ID NO: 17459 - RNA, 20 nt, synthetic construct
  source 1..20: mol_type = other RNA
taggatgattgtcctaaagg

SEQ ID NO: 17460 - RNA, 20 nt, synthetic construct
  source 1..20: mol_type = other RNA
taggcaacatctcccttttt

SEQ ID NO: 17461 - RNA, 20 nt, synthetic construct
  source 1..20: mol_type = other RNA
taggctgggttcatttgtat

SEQ ID NO: 17462 - RNA, 20 nt, synthetic construct
  source 1..20: mol_type = other RNA
tagggaggaataaaagcact

SEQ ID NO: 17463 - RNA, 20 nt, synthetic construct
  source 1..20: mol_type = other RNA
tagggaggtgagattccatt

SEQ ID NO: 17464 - RNA, 20 nt, synthetic construct
  source 1..20: mol_type = other RNA
tagggatgcaaaggggtaga

SEQ ID NO: 17465 - RNA, 20 nt, synthetic construct
  source 1..20: mol_type = other RNA
taggtctgtgtgatacaaat

SEQ ID NO: 17466 - RNA, 20 nt, synthetic construct
  source 1..20: mol_type = other RNA
tagtaactgatctcagatgc

SEQ ID NO: 17467 - RNA, 20 nt, synthetic construct
  source 1..20: mol_type = other RNA
tagtaattctggggttgttg

SEQ ID NO: 17468 - RNA, 20 nt, synthetic construct
  source 1..20: mol_type = other RNA
tagtatactctgatgtctag

SEQ ID NO: 17469 - RNA, 20 nt, synthetic construct
  source 1..20: mol_type = other RNA
tagtatgtggaaaatagtga

SEQ ID NO: 17470 - RNA, 20 nt, synthetic construct
  source 1..20: mol_type = other RNA
tagtattcagacatagcact

SEQ ID NO: 17471 - RNA, 20 nt, synthetic construct
  source 1..20: mol_type = other RNA
tagtcaagatcacctggact

SEQ ID NO: 17472 - RNA, 20 nt, synthetic construct
  source 1..20: mol_type = other RNA
tagtcataccagccactttt

SEQ ID NO: 17473 - RNA, 20 nt, synthetic construct
  source 1..20: mol_type = other RNA
tagtgctatgtctgaatact

SEQ ID NO: 17474 - RNA, 20 nt, synthetic construct
  source 1..20: mol_type = other RNA
tagtgtcttgtactcctgag

SEQ ID NO: 17475 - RNA, 20 nt, synthetic construct
  source 1..20: mol_type = other RNA
tagtgttatcttttgatcca

SEQ ID NO: 17476 - RNA, 20 nt, synthetic construct
  source 1..20: mol_type = other RNA
tagttaaggtaatttaaatc

SEQ ID NO: 17477 - RNA, 20 nt, synthetic construct
  source 1..20: mol_type = other RNA
tagttcacgttcttaaatgt

SEQ ID NO: 17478 - RNA, 20 nt, synthetic construct
  source 1..20: mol_type = other RNA
tataaaactcaggtgatcat

SEQ ID NO: 17479 - RNA, 20 nt, synthetic construct
  source 1..20: mol_type = other RNA
tataactcaagatatgatgc

SEQ ID NO: 17480 - RNA, 20 nt, synthetic construct
  source 1..20: mol_type = other RNA
tataataccaacattttaac

SEQ ID NO: 17481 - RNA, 20 nt, synthetic construct
  source 1..20: mol_type = other RNA
tataattcctcaggataaaa

SEQ ID NO: 17482 - RNA, 20 nt, synthetic construct
  source 1..20: mol_type = other RNA
tataccatttgagacccttg

SEQ ID NO: 17483 - RNA, 20 nt, synthetic construct
  source 1..20: mol_type = other RNA
tatactaggagctcaggagt

SEQ ID NO: 17484 - RNA, 20 nt, synthetic construct
  source 1..20: mol_type = other RNA
tatactctgatgtctagcca

SEQ ID NO: 17485 - RNA, 20 nt, synthetic construct
  source 1..20: mol_type = other RNA
tatactgtccacagttgcaa

SEQ ID NO: 17486 - RNA, 20 nt, synthetic construct
  source 1..20: mol_type = other RNA
tatagctgtagccccggact

SEQ ID NO: 17487 - RNA, 20 nt, synthetic construct
  source 1..20: mol_type = other RNA
tatatatttagctgaaagct

SEQ ID NO: 17488 - RNA, 20 nt, synthetic construct
  source 1..20: mol_type = other RNA
tatatcagaacttgaatgaa

SEQ ID NO: 17489 - RNA, 20 nt, synthetic construct
  source 1..20: mol_type = other RNA
tatatctttgtggggtggtt

SEQ ID NO: 17490 - RNA, 20 nt, synthetic construct
  source 1..20: mol_type = other RNA
tatatgacgtctctatgatt

SEQ ID NO: 17491 - RNA, 20 nt, synthetic construct
  source 1..20: mol_type = other RNA
tatatgtggcccaagacagt

SEQ ID NO: 17492 - RNA, 20 nt, synthetic construct
  source 1..20: mol_type = other RNA
tatatttaactatgtagctc

SEQ ID NO: 17493 - RNA, 20 nt, synthetic construct
  source 1..20: mol_type = other RNA
tatatttagctgaaagctaa

SEQ ID NO: 17494 - RNA, 20 nt, synthetic construct
  source 1..20: mol_type = other RNA
tatcacacagacctattctt

SEQ ID NO: 17495 - RNA, 20 nt, synthetic construct
  source 1..20: mol_type = other RNA
tatcacacaggcatctgaga

SEQ ID NO: 17496 - RNA, 20 nt, synthetic construct
  source 1..20: mol_type = other RNA
tatcactacttatcattttt

SEQ ID NO: 17497 - RNA, 20 nt, synthetic construct
  source 1..20: mol_type = other RNA
tatcagaacttgaatgaaga

SEQ ID NO: 17498 - RNA, 20 nt, synthetic construct
  source 1..20: mol_type = other RNA
tatcatttttggagcatttt

SEQ ID NO: 17499 - RNA, 20 nt, synthetic construct
  source 1..20: mol_type = other RNA
tatccagggaccttatgcat

SEQ ID NO: 17500 - RNA, 20 nt, synthetic construct
  source 1..20: mol_type = other RNA
tatcctgaggaattataata

SEQ ID NO: 17501 - RNA, 20 nt, synthetic construct
  source 1..20: mol_type = other RNA
tatcctttttccttagctgg

SEQ ID NO: 17502 - RNA, 20 nt, synthetic construct
  source 1..20: mol_type = other RNA
tatctaatttgaattgcaac

SEQ ID NO: 17503 - RNA, 20 nt, synthetic construct
  source 1..20: mol_type = other RNA
tatcttcctttaggacaatc

SEQ ID NO: 17504 - RNA, 20 nt, synthetic construct
  source 1..20: mol_type = other RNA
tatcttgagttatagaaaac

SEQ ID NO: 17505 - RNA, 20 nt, synthetic construct
  source 1..20: mol_type = other RNA
tatctttgtggggtggttct

SEQ ID NO: 17506 - RNA, 20 nt, synthetic construct
  source 1..20: mol_type = other RNA
tatcttttgatccatcttac

SEQ ID NO: 17507 - RNA, 20 nt, synthetic construct
  source 1..20: mol_type = other RNA
tatgacccaaactgcccttt

SEQ ID NO: 17508 - RNA, 20 nt, synthetic construct
  source 1..20: mol_type = other RNA
tatgacccacgcagtacaaa

SEQ ID NO: 17509 - RNA, 20 nt, synthetic construct
  source 1..20: mol_type = other RNA
tatgacctctctcctgaagt

SEQ ID NO: 17510 - RNA, 20 nt, synthetic construct
  source 1..20: mol_type = other RNA
tatgacgtctctatgatttg

SEQ ID NO: 17511 - RNA, 20 nt, synthetic construct
  source 1..20: mol_type = other RNA
tatgagtgagagttgctaag

SEQ ID NO: 17512 - RNA, 20 nt, synthetic construct
  source 1..20: mol_type = other RNA
tatgatgcttagagctcctc

SEQ ID NO: 17513 - RNA, 20 nt, synthetic construct
  source 1..20: mol_type = other RNA
tatgatttgggtaactgcaa

SEQ ID NO: 17514 - RNA, 20 nt, synthetic construct
  source 1..20: mol_type = other RNA
tatgcatcacattcacgaga

SEQ ID NO: 17515 - RNA, 20 nt, synthetic construct
  source 1..20: mol_type = other RNA
tatggtttgacattttatta

SEQ ID NO: 17516 - RNA, 20 nt, synthetic construct
  source 1..20: mol_type = other RNA
tatgtagctcctgtaacagt

SEQ ID NO: 17517 - RNA, 20 nt, synthetic construct
  source 1..20: mol_type = other RNA
tatgtctgaatactagagga

SEQ ID NO: 17518 - RNA, 20 nt, synthetic construct
  source 1..20: mol_type = other RNA
tatgtctgtctctagaaaaa

SEQ ID NO: 17519 - RNA, 20 nt, synthetic construct
  source 1..20: mol_type = other RNA
tatgtggcccaagacagttc

SEQ ID NO: 17520 - RNA, 20 nt, synthetic construct
  source 1..20: mol_type = other RNA
tattaagatttaacctgatg

SEQ ID NO: 17521 - RNA, 20 nt, synthetic construct
  source 1..20: mol_type = other RNA
tattaatcttgagcattgga

SEQ ID NO: 17522 - RNA, 20 nt, synthetic construct
  source 1..20: mol_type = other RNA
tattagcaatataaaaagca

SEQ ID NO: 17523 - RNA, 20 nt, synthetic construct
  source 1..20: mol_type = other RNA
tattataattcctcaggata

SEQ ID NO: 17524 - RNA, 20 nt, synthetic construct
  source 1..20: mol_type = other RNA
tattatatatttagctgaaa

SEQ ID NO: 17525 - RNA, 20 nt, synthetic construct
  source 1..20: mol_type = other RNA
tattcagacatagcactagc

SEQ ID NO: 17526 - RNA, 20 nt, synthetic construct
  source 1..20: mol_type = other RNA
tattcctccctagttcacgt

SEQ ID NO: 17527 - RNA, 20 nt, synthetic construct
  source 1..20: mol_type = other RNA
tattccttcaaaaagctcag

SEQ ID NO: 17528 - RNA, 20 nt, synthetic construct
  source 1..20: mol_type = other RNA
tattctgagctttttgaagg

SEQ ID NO: 17529 - RNA, 20 nt, synthetic construct
  source 1..20: mol_type = other RNA
tattctgtaatccacagaac

SEQ ID NO: 17530 - RNA, 20 nt, synthetic construct
  source 1..20: mol_type = other RNA
tatttaactatgtagctcct

SEQ ID NO: 17531 - RNA, 20 nt, synthetic construct
  source 1..20: mol_type = other RNA
tatttagaggaagaaaaagg

SEQ ID NO: 17532 - RNA, 20 nt, synthetic construct
  source 1..20: mol_type = other RNA
tatttagctgaaagctaagt

SEQ ID NO: 17533 - RNA, 20 nt, synthetic construct
  source 1..20: mol_type = other RNA
tatttccttactgctcagta

SEQ ID NO: 17534 - RNA, 20 nt, synthetic construct
  source 1..20: mol_type = other RNA
tatttgtgtgtgtagtatgt

SEQ ID NO: 17535 - RNA, 20 nt, synthetic construct
  source 1..20: mol_type = other RNA
tattttccacatactacaca

SEQ ID NO: 17536 - RNA, 20 nt, synthetic construct
  source 1..20: mol_type = other RNA
tcaaaaagctcagaatagtt

SEQ ID NO: 17537 - RNA, 20 nt, synthetic construct
  source 1..20: mol_type = other RNA
tcaaaagataacactaaaga

SEQ ID NO: 17538 - RNA, 20 nt, synthetic construct
  source 1..20: mol_type = other RNA
tcaaaccataaagacattta

SEQ ID NO: 17539 - RNA, 20 nt, synthetic construct
  source 1..20: mol_type = other RNA
tcaaagctgtcctgggtccc

SEQ ID NO: 17540 - RNA, 20 nt, synthetic construct
  source 1..20: mol_type = other RNA
tcaaatggtataaaactcag

SEQ ID NO: 17541 - RNA, 20 nt, synthetic construct
  source 1..20: mol_type = other RNA
tcaaatgtcatctccccttt

SEQ ID NO: 17542 - RNA, 20 nt, synthetic construct
  source 1..20: mol_type = other RNA
tcaagagagggagaaagcta

SEQ ID NO: 17543 - RNA, 20 nt, synthetic construct
  source 1..20: mol_type = other RNA
tcaagataaacatttaagaa

SEQ ID NO: 17544 - RNA, 20 nt, synthetic construct
  source 1..20: mol_type = other RNA
tcaagatatgatgcttagag

SEQ ID NO: 17545 - RNA, 20 nt, synthetic construct
  source 1..20: mol_type = other RNA
tcaagatcacctggactgtg

SEQ ID NO: 17546 - RNA, 20 nt, synthetic construct
  source 1..20: mol_type = other RNA
tcaagccccagctcaagcct

SEQ ID NO: 17547 - RNA, 20 nt, synthetic construct
  source 1..20: mol_type = other RNA
tcaagccttaatttgtggtg

SEQ ID NO: 17548 - RNA, 20 nt, synthetic construct
  source 1..20: mol_type = other RNA
tcaagtatgagtgagagttg

SEQ ID NO: 17549 - RNA, 20 nt, synthetic construct
  source 1..20: mol_type = other RNA
tcaagtgtttccaggaagtg

SEQ ID NO: 17550 - RNA, 20 nt, synthetic construct
  source 1..20: mol_type = other RNA
tcaagttctgatatatttaa

SEQ ID NO: 17551 - RNA, 20 nt, synthetic construct
  source 1..20: mol_type = other RNA
tcaatgtccacgtattctgt

SEQ ID NO: 17552 - RNA, 20 nt, synthetic construct
  source 1..20: mol_type = other RNA
tcaatttaacagctttttca

SEQ ID NO: 17553 - RNA, 20 nt, synthetic construct
  source 1..20: mol_type = other RNA
tcacaaagtaagttttatcc

SEQ ID NO: 17554 - RNA, 20 nt, synthetic construct
  source 1..20: mol_type = other RNA
tcacacagacctattcttca

SEQ ID NO: 17555 - RNA, 20 nt, synthetic construct
  source 1..20: mol_type = other RNA
tcacacaggcatctgagatc

SEQ ID NO: 17556 - RNA, 20 nt, synthetic construct
  source 1..20: mol_type = other RNA
tcacagtccaggtgatcttg

SEQ ID NO: 17557 - RNA, 20 nt, synthetic construct
  source 1..20: mol_type = other RNA
tcacatggaatgaattgcag

SEQ ID NO: 17558 - RNA, 20 nt, synthetic construct
  source 1..20: mol_type = other RNA
tcacattcacgagaacagaa

SEQ ID NO: 17559 - RNA, 20 nt, synthetic construct
  source 1..20: mol_type = other RNA
tcaccctctctccccaggct

SEQ ID NO: 17560 - RNA, 20 nt, synthetic construct
  source 1..20: mol_type = other RNA
tcacctccctaaaattcatt

SEQ ID NO: 17561 - RNA, 20 nt, synthetic construct
  source 1..20: mol_type = other RNA
tcacctgagttttataccat

SEQ ID NO: 17562 - RNA, 20 nt, synthetic construct
  source 1..20: mol_type = other RNA
tcacctggactgtgaagacg

SEQ ID NO: 17563 - RNA, 20 nt, synthetic construct
  source 1..20: mol_type = other RNA
tcacctgtcattttcatgct

SEQ ID NO: 17564 - RNA, 20 nt, synthetic construct
  source 1..20: mol_type = other RNA
tcacgagaacagaattcatc

SEQ ID NO: 17565 - RNA, 20 nt, synthetic construct
  source 1..20: mol_type = other RNA
tcacgttcttaaatgtttat

SEQ ID NO: 17566 - RNA, 20 nt, synthetic construct
  source 1..20: mol_type = other RNA
tcactacttatcatttttgg

SEQ ID NO: 17567 - RNA, 20 nt, synthetic construct
  source 1..20: mol_type = other RNA
tcactattttccacatacta

SEQ ID NO: 17568 - RNA, 20 nt, synthetic construct
  source 1..20: mol_type = other RNA
tcactcatacttgatcccat

SEQ ID NO: 17569 - RNA, 20 nt, synthetic construct
  source 1..20: mol_type = other RNA
tcactccatttacttaaagt

SEQ ID NO: 17570 - RNA, 20 nt, synthetic construct
  source 1..20: mol_type = other RNA
tcactgttgtccaaggcagg

SEQ ID NO: 17571 - RNA, 20 nt, synthetic construct
  source 1..20: mol_type = other RNA
tcacttcctggaaacacttg

SEQ ID NO: 17572 - RNA, 20 nt, synthetic construct
  source 1..20: mol_type = other RNA
tcagaacttgaatgaagaat

SEQ ID NO: 17573 - RNA, 20 nt, synthetic construct
  source 1..20: mol_type = other RNA
tcagaagaaaactgcttttt

SEQ ID NO: 17574 - RNA, 20 nt, synthetic construct
  source 1..20: mol_type = other RNA
tcagaatagttaaggtaatt

SEQ ID NO: 17575 - RNA, 20 nt, synthetic construct
  source 1..20: mol_type = other RNA
tcagacatagcactagcttt

SEQ ID NO: 17576 - RNA, 20 nt, synthetic construct
  source 1..20: mol_type = other RNA
tcagagtatactaggagctc

SEQ ID NO: 17577 - RNA, 20 nt, synthetic construct
  source 1..20: mol_type = other RNA
tcagatccaattctctgtaa

SEQ ID NO: 17578 - RNA, 20 nt, synthetic construct
  source 1..20: mol_type = other RNA
tcagatgcctgtgtgatagc

SEQ ID NO: 17579 - RNA, 20 nt, synthetic construct
  source 1..20: mol_type = other RNA
tcagcaatgacaacaacccc

SEQ ID NO: 17580 - RNA, 20 nt, synthetic construct
  source 1..20: mol_type = other RNA
tcagctgtcctttatatgtg

SEQ ID NO: 17581 - RNA, 20 nt, synthetic construct
  source 1..20: mol_type = other RNA
tcagcttttatttccttact

SEQ ID NO: 17582 - RNA, 20 nt, synthetic construct
  source 1..20: mol_type = other RNA
tcaggagagaggtcatattt

SEQ ID NO: 17583 - RNA, 20 nt, synthetic construct
  source 1..20: mol_type = other RNA
tcaggagtacaagacactat

SEQ ID NO: 17584 - RNA, 20 nt, synthetic construct
  source 1..20: mol_type = other RNA
tcaggagtcagaagaaaact

SEQ ID NO: 17585 - RNA, 20 nt, synthetic construct
  source 1..20: mol_type = other RNA
tcaggataaaacttactttg

SEQ ID NO: 17586 - RNA, 20 nt, synthetic construct
  source 1..20: mol_type = other RNA
tcagggacagaatcccagct

SEQ ID NO: 17587 - RNA, 20 nt, synthetic construct
  source 1..20: mol_type = other RNA
tcaggtgatcatgctttatg

SEQ ID NO: 17588 - RNA, 20 nt, synthetic construct
  source 1..20: mol_type = other RNA
tcagtaaaaagagaaaacca

SEQ ID NO: 17589 - RNA, 20 nt, synthetic construct
  source 1..20: mol_type = other RNA
tcagttactaactggtaaga

SEQ ID NO: 17590 - RNA, 20 nt, synthetic construct
  source 1..20: mol_type = other RNA
tcagttctttagtcatacca

SEQ ID NO: 17591 - RNA, 20 nt, synthetic construct
  source 1..20: mol_type = other RNA
tcataccagccacttttcca

SEQ ID NO: 17592 - RNA, 20 nt, synthetic construct
  source 1..20: mol_type = other RNA
tcatacttgatcccattttc

SEQ ID NO: 17593 - RNA, 20 nt, synthetic construct
  source 1..20: mol_type = other RNA
tcatagaacaacagaccatg

SEQ ID NO: 17594 - RNA, 20 nt, synthetic construct
  source 1..20: mol_type = other RNA
tcatagagacgtcatatatc

SEQ ID NO: 17595 - RNA, 20 nt, synthetic construct
  source 1..20: mol_type = other RNA
tcatagtaattctggggttg

SEQ ID NO: 17596 - RNA, 20 nt, synthetic construct
  source 1..20: mol_type = other RNA
tcatatatctttgtggggtg

SEQ ID NO: 17597 - RNA, 20 nt, synthetic construct
  source 1..20: mol_type = other RNA
tcatatcttgagttatagaa

SEQ ID NO: 17598 - RNA, 20 nt, synthetic construct
  source 1..20: mol_type = other RNA
tcatatttgtgtgtgtagta

SEQ ID NO: 17599 - RNA, 20 nt, synthetic construct
  source 1..20: mol_type = other RNA
tcatcagctgtcctttatat

SEQ ID NO: 17600 - RNA, 20 nt, synthetic construct
  source 1..20: mol_type = other RNA
tcatcctaacaagatgtaag

SEQ ID NO: 17601 - RNA, 20 nt, synthetic construct
  source 1..20: mol_type = other RNA
tcatcctgtaaaccaggggt

SEQ ID NO: 17602 - RNA, 20 nt, synthetic construct
  source 1..20: mol_type = other RNA
tcatctcccctttggtcatg

SEQ ID NO: 17603 - RNA, 20 nt, synthetic construct
  source 1..20: mol_type = other RNA
tcatgccttccatggtctgt

SEQ ID NO: 17604 - RNA, 20 nt, synthetic construct
  source 1..20: mol_type = other RNA
tcatgctctatcttccttta

SEQ ID NO: 17605 - RNA, 20 nt, synthetic construct
  source 1..20: mol_type = other RNA
tcatgctttatgtctgtctc

SEQ ID NO: 17606 - RNA, 20 nt, synthetic construct
  source 1..20: mol_type = other RNA
tcattaacgcttgctttcac

SEQ ID NO: 17607 - RNA, 20 nt, synthetic construct
  source 1..20: mol_type = other RNA
tcattccatgtgacttcagg

SEQ ID NO: 17608 - RNA, 20 nt, synthetic construct
  source 1..20: mol_type = other RNA
tcattgctgatttaaattac

SEQ ID NO: 17609 - RNA, 20 nt, synthetic construct
  source 1..20: mol_type = other RNA
tcatttctgttcttaccagt

SEQ ID NO: 17610 - RNA, 20 nt, synthetic construct
  source 1..20: mol_type = other RNA
tcatttgtatcacacagacc

SEQ ID NO: 17611 - RNA, 20 nt, synthetic construct
  source 1..20: mol_type = other RNA
tcattttatcctttttcctt

SEQ ID NO: 17612 - RNA, 20 nt, synthetic construct
  source 1..20: mol_type = other RNA
tcattttcatgctctatctt

SEQ ID NO: 17613 - RNA, 20 nt, synthetic construct
  source 1..20: mol_type = other RNA
tcatttttcactattttcca

SEQ ID NO: 17614 - RNA, 20 nt, synthetic construct
  source 1..20: mol_type = other RNA
tcatttttggagcatttttc

SEQ ID NO: 17615 - RNA, 20 nt, synthetic construct
  source 1..20: mol_type = other RNA
tccaaaaagaaccaccccac

SEQ ID NO: 17616 - RNA, 20 nt, synthetic construct
  source 1..20: mol_type = other RNA
tccaaaaatgataagtagtg

SEQ ID NO: 17617 - RNA, 20 nt, synthetic construct
  source 1..20: mol_type = other RNA
tccaaactcattaacgcttg

SEQ ID NO: 17618 - RNA, 20 nt, synthetic construct
  source 1..20: mol_type = other RNA
tccaaattgctgtctctgtc

SEQ ID NO: 17619 - RNA, 20 nt, synthetic construct
  source 1..20: mol_type = other RNA
tccaacaaaccatttttaaa

SEQ ID NO: 17620 - RNA, 20 nt, synthetic construct
  source 1..20: mol_type = other RNA
tccaaggcaggcacatcttt

SEQ ID NO: 17621 - RNA, 20 nt, synthetic construct
  source 1..20: mol_type = other RNA
tccaatcaagtgtttccagg

SEQ ID NO: 17622 - RNA, 20 nt, synthetic construct
  source 1..20: mol_type = other RNA
tccaatgctcaagattaata

SEQ ID NO: 17623 - RNA, 20 nt, synthetic construct
  source 1..20: mol_type = other RNA
tccaattctctgtaaagcag

SEQ ID NO: 17624 - RNA, 20 nt, synthetic construct
  source 1..20: mol_type = other RNA
tccacagaacaagtccgggg

SEQ ID NO: 17625 - RNA, 20 nt, synthetic construct
  source 1..20: mol_type = other RNA
tccacagttgcaattcaaat

SEQ ID NO: 17626 - RNA, 20 nt, synthetic construct
  source 1..20: mol_type = other RNA
tccacatactacacacacaa

SEQ ID NO: 17627 - RNA, 20 nt, synthetic construct
  source 1..20: mol_type = other RNA
tccaccacaaattaaggctt

SEQ ID NO: 17628 - RNA, 20 nt, synthetic construct
  source 1..20: mol_type = other RNA
tccacgtattctgtaatcca

SEQ ID NO: 17629 - RNA, 20 nt, synthetic construct
  source 1..20: mol_type = other RNA
tccaggaagtgaaaacttgt

SEQ ID NO: 17630 - RNA, 20 nt, synthetic construct
  source 1..20: mol_type = other RNA
tccagggaccttatgcatca

SEQ ID NO: 17631 - RNA, 20 nt, synthetic construct
  source 1..20: mol_type = other RNA
tccaggtgatcttgactact

SEQ ID NO: 17632 - RNA, 20 nt, synthetic construct
  source 1..20: mol_type = other RNA
tccatcttacatcttgttag

SEQ ID NO: 17633 - RNA, 20 nt, synthetic construct
  source 1..20: mol_type = other RNA
tccatggtctgttgttctat

SEQ ID NO: 17634 - RNA, 20 nt, synthetic construct
  source 1..20: mol_type = other RNA
tccatgtgacttcaggagag

SEQ ID NO: 17635 - RNA, 20 nt, synthetic construct
  source 1..20: mol_type = other RNA
tccattaaactgttacagga

SEQ ID NO: 17636 - RNA, 20 nt, synthetic construct
  source 1..20: mol_type = other RNA
tccattactggcttgtactg

SEQ ID NO: 17637 - RNA, 20 nt, synthetic construct
  source 1..20: mol_type = other RNA
tccatttacttaaagttggc

SEQ ID NO: 17638 - RNA, 20 nt, synthetic construct
  source 1..20: mol_type = other RNA
tccatttgttgtacttgctc

SEQ ID NO: 17639 - RNA, 20 nt, synthetic construct
  source 1..20: mol_type = other RNA
tcccagctaaggaaaaagga

SEQ ID NO: 17640 - RNA, 20 nt, synthetic construct
  source 1..20: mol_type = other RNA
tcccatgcggcccgcgggtt

SEQ ID NO: 17641 - RNA, 20 nt, synthetic construct
  source 1..20: mol_type = other RNA
tcccattttccatttgttgt

SEQ ID NO: 17642 - RNA, 20 nt, synthetic construct
  source 1..20: mol_type = other RNA
tccccaggctctctacccct

SEQ ID NO: 17643 - RNA, 20 nt, synthetic construct
  source 1..20: mol_type = other RNA
tcccctttggtcatgccttc

SEQ ID NO: 17644 - RNA, 20 nt, synthetic construct
  source 1..20: mol_type = other RNA
tccctaccaggcatcttagc

SEQ ID NO: 17645 - RNA, 20 nt, synthetic construct
  source 1..20: mol_type = other RNA
tccctagttcacgttcttaa

SEQ ID NO: 17646 - RNA, 20 nt, synthetic construct
  source 1..20: mol_type = other RNA
tccctcaccctctctcccca

SEQ ID NO: 17647 - RNA, 20 nt, synthetic construct
  source 1..20: mol_type = other RNA
tccctccctcaccctctctc

SEQ ID NO: 17648 - RNA, 20 nt, synthetic construct
  source 1..20: mol_type = other RNA
tccctctcttgatcttgggt

SEQ ID NO: 17649 - RNA, 20 nt, synthetic construct
  source 1..20: mol_type = other RNA
tccctgaccgtcttcacagt

SEQ ID NO: 17650 - RNA, 20 nt, synthetic construct
  source 1..20: mol_type = other RNA
tccctggatagactttcctc

SEQ ID NO: 17651 - RNA, 20 nt, synthetic construct
  source 1..20: mol_type = other RNA
tccctgggccacactgcaag

SEQ ID NO: 17652 - RNA, 20 nt, synthetic construct
  source 1..20: mol_type = other RNA
tccctttttcttcctctaaa

SEQ ID NO: 17653 - RNA, 20 nt, synthetic construct
  source 1..20: mol_type = other RNA
tccggggctacagctatact

SEQ ID NO: 17654 - RNA, 20 nt, synthetic construct
  source 1..20: mol_type = other RNA
tcctaaaactttaagaaagt

SEQ ID NO: 17655 - RNA, 20 nt, synthetic construct
  source 1..20: mol_type = other RNA
tcctaaaggaagatagagca

SEQ ID NO: 17656 - RNA, 20 nt, synthetic construct
  source 1..20: mol_type = other RNA
tcctaacaagatgtaagatg

SEQ ID NO: 17657 - RNA, 20 nt, synthetic construct
  source 1..20: mol_type = other RNA
tcctacaagttttcacttcc

SEQ ID NO: 17658 - RNA, 20 nt, synthetic construct
  source 1..20: mol_type = other RNA
tcctagtatactctgatgtc

SEQ ID NO: 17659 - RNA, 20 nt, synthetic construct
  source 1..20: mol_type = other RNA
tcctcaatttaacagctttt

SEQ ID NO: 17660 - RNA, 20 nt, synthetic construct
  source 1..20: mol_type = other RNA
tcctcaggataaaacttact

SEQ ID NO: 17661 - RNA, 20 nt, synthetic construct
  source 1..20: mol_type = other RNA
tcctccaatcaagtgtttcc

SEQ ID NO: 17662 - RNA, 20 nt, synthetic construct
  source 1..20: mol_type = other RNA
tcctccctagttcacgttct

SEQ ID NO: 17663 - RNA, 20 nt, synthetic construct
  source 1..20: mol_type = other RNA
tcctctaaatacctctcatt

SEQ ID NO: 17664 - RNA, 20 nt, synthetic construct
  source 1..20: mol_type = other RNA
tcctctagtattcagacata

SEQ ID NO: 17665 - RNA, 20 nt, synthetic construct
  source 1..20: mol_type = other RNA
tcctgaagtcacatggaatg

SEQ ID NO: 17666 - RNA, 20 nt, synthetic construct
  source 1..20: mol_type = other RNA
tcctgagcagtttgtactgc

SEQ ID NO: 17667 - RNA, 20 nt, synthetic construct
  source 1..20: mol_type = other RNA
tcctgagctcctagtatact

SEQ ID NO: 17668 - RNA, 20 nt, synthetic construct
  source 1..20: mol_type = other RNA
tcctgaggaattataatacc

SEQ ID NO: 17669 - RNA, 20 nt, synthetic construct
  source 1..20: mol_type = other RNA
tcctgcagattcaaatgtca

SEQ ID NO: 17670 - RNA, 20 nt, synthetic construct
  source 1..20: mol_type = other RNA
tcctggaaacacttgattgg

SEQ ID NO: 17671 - RNA, 20 nt, synthetic construct
  source 1..20: mol_type = other RNA
tcctgggtcccatgcggccc

SEQ ID NO: 17672 - RNA, 20 nt, synthetic construct
  source 1..20: mol_type = other RNA
tcctgtaaaccaggggtgtc

SEQ ID NO: 17673 - RNA, 20 nt, synthetic construct
  source 1..20: mol_type = other RNA
tcctgtaacagtttaatgga

SEQ ID NO: 17674 - RNA, 20 nt, synthetic construct
  source 1..20: mol_type = other RNA
tccttactgctcagtaaaaa

SEQ ID NO: 17675 - RNA, 20 nt, synthetic construct
  source 1..20: mol_type = other RNA
tccttagctgggattctgtc

SEQ ID NO: 17676 - RNA, 20 nt, synthetic construct
  source 1..20: mol_type = other RNA
tccttcaaaaagctcagaat

SEQ ID NO: 17677 - RNA, 20 nt, synthetic construct
  source 1..20: mol_type = other RNA
tcctttaggacaatcatcct

SEQ ID NO: 17678 - RNA, 20 nt, synthetic construct
  source 1..20: mol_type = other RNA
tcctttatatgtggcccaag

SEQ ID NO: 17679 - RNA, 20 nt, synthetic construct
  source 1..20: mol_type = other RNA
tcctttttccttagctggga

SEQ ID NO: 17680 - RNA, 20 nt, synthetic construct
  source 1..20: mol_type = other RNA
tcgcattcaaagctgtcctg

SEQ ID NO: 17681 - RNA, 20 nt, synthetic construct
  source 1..20: mol_type = other RNA
tcgcgaaaccagacagattg

SEQ ID NO: 17682 - RNA, 20 nt, synthetic construct
  source 1..20: mol_type = other RNA
tcgcgagacaccaggctacc

SEQ ID NO: 17683 - RNA, 20 nt, synthetic construct
  source 1..20: mol_type = other RNA
tcgctcactccatttactta

SEQ ID NO: 17684 - RNA, 20 nt, synthetic construct
  source 1..20: mol_type = other RNA
tcggcttccctgggccacac

SEQ ID NO: 17685 - RNA, 20 nt, synthetic construct
  source 1..20: mol_type = other RNA
tcgtaaactttcttaaagtt

SEQ ID NO: 17686 - RNA, 20 nt, synthetic construct
  source 1..20: mol_type = other RNA
tcgtgaatgtgatgcataag

SEQ ID NO: 17687 - RNA, 20 nt, synthetic construct
  source 1..20: mol_type = other RNA
tctaaatacctctcatttct

SEQ ID NO: 17688 - RNA, 20 nt, synthetic construct
  source 1..20: mol_type = other RNA
tctaacccgcgggccgcatg

SEQ ID NO: 17689 - RNA, 20 nt, synthetic construct
  source 1..20: mol_type = other RNA
tctaagcatcatatcttgag

SEQ ID NO: 17690 - RNA, 20 nt, synthetic construct
  source 1..20: mol_type = other RNA
tctaatttgaattgcaactg

SEQ ID NO: 17691 - RNA, 20 nt, synthetic construct
  source 1..20: mol_type = other RNA
tctacccctttgcatcccta

SEQ ID NO: 17692 - RNA, 20 nt, synthetic construct
  source 1..20: mol_type = other RNA
tctagaaaaatgctccaaaa

SEQ ID NO: 17693 - RNA, 20 nt, synthetic construct
  source 1..20: mol_type = other RNA
tctagagacagacataaagc

SEQ ID NO: 17694 - RNA, 20 nt, synthetic construct
  source 1..20: mol_type = other RNA
tctagccaactttaagtaaa

SEQ ID NO: 17695 - RNA, 20 nt, synthetic construct
  source 1..20: mol_type = other RNA
tctagtattcagacatagca

SEQ ID NO: 17696 - RNA, 20 nt, synthetic construct
  source 1..20: mol_type = other RNA
tctataactcaagatatgat

SEQ ID NO: 17697 - RNA, 20 nt, synthetic construct
  source 1..20: mol_type = other RNA
tctatccagggaccttatgc

SEQ ID NO: 17698 - RNA, 20 nt, synthetic construct
  source 1..20: mol_type = other RNA
tctatcttcctttaggacaa

SEQ ID NO: 17699 - RNA, 20 nt, synthetic construct
  source 1..20: mol_type = other RNA
tctatgacccaaactgccct

SEQ ID NO: 17700 - RNA, 20 nt, synthetic construct
  source 1..20: mol_type = other RNA
tctatgatttgggtaactgc

SEQ ID NO: 17701 - RNA, 20 nt, synthetic construct
  source 1..20: mol_type = other RNA
tctattaagatttaacctga

SEQ ID NO: 17702 - RNA, 20 nt, synthetic construct
  source 1..20: mol_type = other RNA
tctcaaatggtataaaactc

SEQ ID NO: 17703 - RNA, 20 nt, synthetic construct
  source 1..20: mol_type = other RNA
tctcaagcaaaagctaaaat

SEQ ID NO: 17704 - RNA, 20 nt, synthetic construct
  source 1..20: mol_type = other RNA
tctcacctccctaaaattca

SEQ ID NO: 17705 - RNA, 20 nt, synthetic construct
  source 1..20: mol_type = other RNA
tctcactcatacttgatccc

SEQ ID NO: 17706 - RNA, 20 nt, synthetic construct
  source 1..20: mol_type = other RNA
tctcagatgcctgtgtgata

SEQ ID NO: 17707 - RNA, 20 nt, synthetic construct
  source 1..20: mol_type = other RNA
tctcatttctgttcttacca

SEQ ID NO: 17708 - RNA, 20 nt, synthetic construct
  source 1..20: mol_type = other RNA
tctccccaggctctctaccc

SEQ ID NO: 17709 - RNA, 20 nt, synthetic construct
  source 1..20: mol_type = other RNA
tctcccctttggtcatgcct

SEQ ID NO: 17710 - RNA, 20 nt, synthetic construct
  source 1..20: mol_type = other RNA
tctccctctcttgatcttgg

SEQ ID NO: 17711 - RNA, 20 nt, synthetic construct
  source 1..20: mol_type = other RNA
tctccctttttcttcctcta

SEQ ID NO: 17712 - RNA, 20 nt, synthetic construct
  source 1..20: mol_type = other RNA
tctcctgaagtcacatggaa

SEQ ID NO: 17713 - RNA, 20 nt, synthetic construct
  source 1..20: mol_type = other RNA
tctcgcgaaaccagacagat

SEQ ID NO: 17714 - RNA, 20 nt, synthetic construct
  source 1..20: mol_type = other RNA
tctcgtgaatgtgatgcata

SEQ ID NO: 17715 - RNA, 20 nt, synthetic construct
  source 1..20: mol_type = other RNA
tctctacccctttgcatccc

SEQ ID NO: 17716 - RNA, 20 nt, synthetic construct
  source 1..20: mol_type = other RNA
tctctagaaaaatgctccaa

SEQ ID NO: 17717 - RNA, 20 nt, synthetic construct
  source 1..20: mol_type = other RNA
tctctatgatttgggtaact

SEQ ID NO: 17718 - RNA, 20 nt, synthetic construct
  source 1..20: mol_type = other RNA
tctctccccaggctctctac

SEQ ID NO: 17719 - RNA, 20 nt, synthetic construct
  source 1..20: mol_type = other RNA
tctctcctgaagtcacatgg

SEQ ID NO: 17720 - RNA, 20 nt, synthetic construct
  source 1..20: mol_type = other RNA
tctctggcccattacatttc

SEQ ID NO: 17721 - RNA, 20 nt, synthetic construct
  source 1..20: mol_type = other RNA
tctctgtaaagcagtagtca

SEQ ID NO: 17722 - RNA, 20 nt, synthetic construct
  source 1..20: mol_type = other RNA
tctctgtctttagtgttatc

SEQ ID NO: 17723 - RNA, 20 nt, synthetic construct
  source 1..20: mol_type = other RNA
tctcttgatcttgggtagcc

SEQ ID NO: 17724 - RNA, 20 nt, synthetic construct
  source 1..20: mol_type = other RNA
tctctttttactgagcagta

SEQ ID NO: 17725 - RNA, 20 nt, synthetic construct
  source 1..20: mol_type = other RNA
tctgaatactagaggagcaa

SEQ ID NO: 17726 - RNA, 20 nt, synthetic construct
  source 1..20: mol_type = other RNA
tctgactcctgagcagtttg

SEQ ID NO: 17727 - RNA, 20 nt, synthetic construct
  source 1..20: mol_type = other RNA
tctgagatcagttactaact

SEQ ID NO: 17728 - RNA, 20 nt, synthetic construct
  source 1..20: mol_type = other RNA
tctgagctttttgaaggaat

SEQ ID NO: 17729 - RNA, 20 nt, synthetic construct
  source 1..20: mol_type = other RNA
tctgaggttaggcaacatct

SEQ ID NO: 17730 - RNA, 20 nt, synthetic construct
  source 1..20: mol_type = other RNA
tctgatatatttaactatgt

SEQ ID NO: 17731 - RNA, 20 nt, synthetic construct
  source 1..20: mol_type = other RNA
tctgatgtctagccaacttt

SEQ ID NO: 17732 - RNA, 20 nt, synthetic construct
  source 1..20: mol_type = other RNA
tctgcaggattaaaagcagc

SEQ ID NO: 17733 - RNA, 20 nt, synthetic construct
  source 1..20: mol_type = other RNA
tctggcccattacatttcat

SEQ ID NO: 17734 - RNA, 20 nt, synthetic construct
  source 1..20: mol_type = other RNA
tctggggttgttgtcattgc

SEQ ID NO: 17735 - RNA, 20 nt, synthetic construct
  source 1..20: mol_type = other RNA
tctggtttcgcgagacacca

SEQ ID NO: 17736 - RNA, 20 nt, synthetic construct
  source 1..20: mol_type = other RNA
tctgtaaagcagtagtcaag

SEQ ID NO: 17737 - RNA, 20 nt, synthetic construct
  source 1..20: mol_type = other RNA
tctgtaatccacagaacaag

SEQ ID NO: 17738 - RNA, 20 nt, synthetic construct
  source 1..20: mol_type = other RNA
tctgtccctgaccgtcttca

SEQ ID NO: 17739 - RNA, 20 nt, synthetic construct
  source 1..20: mol_type = other RNA
tctgtcctacaagttttcac

SEQ ID NO: 17740 - RNA, 20 nt, synthetic construct
  source 1..20: mol_type = other RNA
tctgtctctagaaaaatgct

SEQ ID NO: 17741 - RNA, 20 nt, synthetic construct
  source 1..20: mol_type = other RNA
tctgtctggtttcgcgagac

SEQ ID NO: 17742 - RNA, 20 nt, synthetic construct
  source 1..20: mol_type = other RNA
tctgtctttagtgttatctt

SEQ ID NO: 17743 - RNA, 20 nt, synthetic construct
  source 1..20: mol_type = other RNA
tctgtggattacagaatacg

SEQ ID NO: 17744 - RNA, 20 nt, synthetic construct
  source 1..20: mol_type = other RNA
tctgtgtgatacaaatgaac

SEQ ID NO: 17745 - RNA, 20 nt, synthetic construct
  source 1..20: mol_type = other RNA
tctgttctcgtgaatgtgat

SEQ ID NO: 17746 - RNA, 20 nt, synthetic construct
  source 1..20: mol_type = other RNA
tctgttcttaccagttagta

SEQ ID NO: 17747 - RNA, 20 nt, synthetic construct
  source 1..20: mol_type = other RNA
tctgttgttctatgacccaa

SEQ ID NO: 17748 - RNA, 20 nt, synthetic construct
  source 1..20: mol_type = other RNA
tcttacatcttgttaggatg

SEQ ID NO: 17749 - RNA, 20 nt, synthetic construct
  source 1..20: mol_type = other RNA
tcttaccagttagtaactga

SEQ ID NO: 17750 - RNA, 20 nt, synthetic construct
  source 1..20: mol_type = other RNA
tcttacccagcagtgctttt

SEQ ID NO: 17751 - RNA, 20 nt, synthetic construct
  source 1..20: mol_type = other RNA
tcttagcaactctcactcat

SEQ ID NO: 17752 - RNA, 20 nt, synthetic construct
  source 1..20: mol_type = other RNA
tcttcacagtccaggtgatc

SEQ ID NO: 17753 - RNA, 20 nt, synthetic construct
  source 1..20: mol_type = other RNA
tcttcattcaagttctgata

SEQ ID NO: 17754 - RNA, 20 nt, synthetic construct
  source 1..20: mol_type = other RNA
tcttcctctaaatacctctc

SEQ ID NO: 17755 - RNA, 20 nt, synthetic construct
  source 1..20: mol_type = other RNA
tcttcctttaggacaatcat

SEQ ID NO: 17756 - RNA, 20 nt, synthetic construct
  source 1..20: mol_type = other RNA
tcttctgactcctgagcagt

SEQ ID NO: 17757 - RNA, 20 nt, synthetic construct
  source 1..20: mol_type = other RNA
tcttgactactgctttacag

SEQ ID NO: 17758 - RNA, 20 nt, synthetic construct
  source 1..20: mol_type = other RNA
tcttgagcattggaaaagtg

SEQ ID NO: 17759 - RNA, 20 nt, synthetic construct
  source 1..20: mol_type = other RNA
tcttgagttatagaaaacaa

SEQ ID NO: 17760 - RNA, 20 nt, synthetic construct
  source 1..20: mol_type = other RNA
tcttgatcttgggtagcctg

SEQ ID NO: 17761 - RNA, 20 nt, synthetic construct
  source 1..20: mol_type = other RNA
tcttgattttcattttatcc

SEQ ID NO: 17762 - RNA, 20 nt, synthetic construct
  source 1..20: mol_type = other RNA
tcttgcagtgtggcccaggg

SEQ ID NO: 17763 - RNA, 20 nt, synthetic construct
  source 1..20: mol_type = other RNA
tcttgggccacatataaagg

SEQ ID NO: 17764 - RNA, 20 nt, synthetic construct
  source 1..20: mol_type = other RNA
tcttgggtagcctggtgtct

SEQ ID NO: 17765 - RNA, 20 nt, synthetic construct
  source 1..20: mol_type = other RNA
tcttgtactcctgagctcct

SEQ ID NO: 17766 - RNA, 20 nt, synthetic construct
  source 1..20: mol_type = other RNA
tcttgttaggatgattgtcc

SEQ ID NO: 17767 - RNA, 20 nt, synthetic construct
  source 1..20: mol_type = other RNA
tctttaaaaatggtttgttg

SEQ ID NO: 17768 - RNA, 20 nt, synthetic construct
  source 1..20: mol_type = other RNA
tctttagtcataccagccac

SEQ ID NO: 17769 - RNA, 20 nt, synthetic construct
  source 1..20: mol_type = other RNA
tctttagtgttatcttttga

SEQ ID NO: 17770 - RNA, 20 nt, synthetic construct
  source 1..20: mol_type = other RNA
tctttcggcttccctgggcc

SEQ ID NO: 17771 - RNA, 20 nt, synthetic construct
  source 1..20: mol_type = other RNA
tctttgtggggtggttcttt

SEQ ID NO: 17772 - RNA, 20 nt, synthetic construct
  source 1..20: mol_type = other RNA
tcttttgatccatcttacat

SEQ ID NO: 17773 - RNA, 20 nt, synthetic construct
  source 1..20: mol_type = other RNA
tctttttactgagcagtaag

SEQ ID NO: 17774 - RNA, 20 nt, synthetic construct
  source 1..20: mol_type = other RNA
tctttttggaatgctaccct

SEQ ID NO: 17775 - RNA, 20 nt, synthetic construct
  source 1..20: mol_type = other RNA
tgaaaaagctgttaaattga

SEQ ID NO: 17776 - RNA, 20 nt, synthetic construct
  source 1..20: mol_type = other RNA
tgaaaaatgaaaaagctgtt

SEQ ID NO: 17777 - RNA, 20 nt, synthetic construct
  source 1..20: mol_type = other RNA
tgaaaacttgtaggacagaa

SEQ ID NO: 17778 - RNA, 20 nt, synthetic construct
  source 1..20: mol_type = other RNA
tgaaaatcaagataaacatt

SEQ ID NO: 17779 - RNA, 20 nt, synthetic construct
  source 1..20: mol_type = other RNA
tgaaaatgacaggtgaaact

SEQ ID NO: 17780 - RNA, 20 nt, synthetic construct
  source 1..20: mol_type = other RNA
tgaaactccattactggctt

SEQ ID NO: 17781 - RNA, 20 nt, synthetic construct
  source 1..20: mol_type = other RNA
tgaaagcaagcgttaatgag

SEQ ID NO: 17782 - RNA, 20 nt, synthetic construct
  source 1..20: mol_type = other RNA
tgaaagctaagtccaacaaa

SEQ ID NO: 17783 - RNA, 20 nt, synthetic construct
  source 1..20: mol_type = other RNA
tgaaatccaaactcattaac

SEQ ID NO: 17784 - RNA, 20 nt, synthetic construct
  source 1..20: mol_type = other RNA
tgaaatgtaatgggccagag

SEQ ID NO: 17785 - RNA, 20 nt, synthetic construct
  source 1..20: mol_type = other RNA
tgaacccagcctaaatttct

SEQ ID NO: 17786 - RNA, 20 nt, synthetic construct
  source 1..20: mol_type = other RNA
tgaactagggaggaataaaa

SEQ ID NO: 17787 - RNA, 20 nt, synthetic construct
  source 1..20: mol_type = other RNA
tgaagaataggtctgtgtga

SEQ ID NO: 17788 - RNA, 20 nt, synthetic construct
  source 1..20: mol_type = other RNA
tgaagacggtcagggacaga

SEQ ID NO: 17789 - RNA, 20 nt, synthetic construct
  source 1..20: mol_type = other RNA
tgaagctctctggcccatta

SEQ ID NO: 17790 - RNA, 20 nt, synthetic construct
  source 1..20: mol_type = other RNA
tgaaggaatagtgtcttgta

SEQ ID NO: 17791 - RNA, 20 nt, synthetic construct
  source 1..20: mol_type = other RNA
tgaagtcacatggaatgaat

SEQ ID NO: 17792 - RNA, 20 nt, synthetic construct
  source 1..20: mol_type = other RNA
tgaatactagaggagcaagt

SEQ ID NO: 17793 - RNA, 20 nt, synthetic construct
  source 1..20: mol_type = other RNA
tgaatctgcaggattaaaag

SEQ ID NO: 17794 - RNA, 20 nt, synthetic construct
  source 1..20: mol_type = other RNA
tgaatgaagaataggtctgt

SEQ ID NO: 17795 - RNA, 20 nt, synthetic construct
  source 1..20: mol_type = other RNA
tgaatgtgatgcataaggtc

SEQ ID NO: 17796 - RNA, 20 nt, synthetic construct
  source 1..20: mol_type = other RNA
tgaattctgttctcgtgaat

SEQ ID NO: 17797 - RNA, 20 nt, synthetic construct
  source 1..20: mol_type = other RNA
tgaattgcaactgtggacag

SEQ ID NO: 17798 - RNA, 20 nt, synthetic construct
  source 1..20: mol_type = other RNA
tgaattgcagttacccaaat

SEQ ID NO: 17799 - RNA, 20 nt, synthetic construct
  source 1..20: mol_type = other RNA
tgaattttagggaggtgaga

SEQ ID NO: 17800 - RNA, 20 nt, synthetic construct
  source 1..20: mol_type = other RNA
tgacaacaaccccagaatta

SEQ ID NO: 17801 - RNA, 20 nt, synthetic construct
  source 1..20: mol_type = other RNA
tgacaggtgaaactccatta

SEQ ID NO: 17802 - RNA, 20 nt, synthetic construct
  source 1..20: mol_type = other RNA
tgacatttgaatctgcagga

SEQ ID NO: 17803 - RNA, 20 nt, synthetic construct
  source 1..20: mol_type = other RNA
tgacattttattaatcttga

SEQ ID NO: 17804 - RNA, 20 nt, synthetic construct
  source 1..20: mol_type = other RNA
tgaccaaaggggagatgaca

SEQ ID NO: 17805 - RNA, 20 nt, synthetic construct
  source 1..20: mol_type = other RNA
tgacccaaactgccctttta

SEQ ID NO: 17806 - RNA, 20 nt, synthetic construct
  source 1..20: mol_type = other RNA
tgacccacgcagtacaaact

SEQ ID NO: 17807 - RNA, 20 nt, synthetic construct
  source 1..20: mol_type = other RNA
tgaccgtcttcacagtccag

SEQ ID NO: 17808 - RNA, 20 nt, synthetic construct
  source 1..20: mol_type = other RNA
tgacctctctcctgaagtca

SEQ ID NO: 17809 - RNA, 20 nt, synthetic construct
  source 1..20: mol_type = other RNA
tgacgtctctatgatttggg

SEQ ID NO: 17810 - RNA, 20 nt, synthetic construct
  source 1..20: mol_type = other RNA
tgactactgctttacagaga

SEQ ID NO: 17811 - RNA, 20 nt, synthetic construct
  source 1..20: mol_type = other RNA
tgactcctgagcagtttgta

SEQ ID NO: 17812 - RNA, 20 nt, synthetic construct
  source 1..20: mol_type = other RNA
tgactcttacccagcagtgc

SEQ ID NO: 17813 - RNA, 20 nt, synthetic construct
  source 1..20: mol_type = other RNA
tgacttcaggagagaggtca

SEQ ID NO: 17814 - RNA, 20 nt, synthetic construct
  source 1..20: mol_type = other RNA
tgagaaaccagtgcttccct

SEQ ID NO: 17815 - RNA, 20 nt, synthetic construct
  source 1..20: mol_type = other RNA
tgagacccttgctgcaccac

SEQ ID NO: 17816 - RNA, 20 nt, synthetic construct
  source 1..20: mol_type = other RNA
tgagaggtatttagaggaag

SEQ ID NO: 17817 - RNA, 20 nt, synthetic construct
  source 1..20: mol_type = other RNA
tgagagttgctaagatgcct

SEQ ID NO: 17818 - RNA, 20 nt, synthetic construct
  source 1..20: mol_type = other RNA
tgagatcagttactaactgg

SEQ ID NO: 17819 - RNA, 20 nt, synthetic construct
  source 1..20: mol_type = other RNA
tgagattccattaaactgtt

SEQ ID NO: 17820 - RNA, 20 nt, synthetic construct
  source 1..20: mol_type = other RNA
tgagcagtaaggaaataaaa

SEQ ID NO: 17821 - RNA, 20 nt, synthetic construct
  source 1..20: mol_type = other RNA
tgagcagtttgtactgcgtg

SEQ ID NO: 17822 - RNA, 20 nt, synthetic construct
  source 1..20: mol_type = other RNA
tgagcattggaaaagtggct

SEQ ID NO: 17823 - RNA, 20 nt, synthetic construct
  source 1..20: mol_type = other RNA
tgagcgacatgtaaatgtct

SEQ ID NO: 17824 - RNA, 20 nt, synthetic construct
  source 1..20: mol_type = other RNA
tgagctcctagtatactctg

SEQ ID NO: 17825 - RNA, 20 nt, synthetic construct
  source 1..20: mol_type = other RNA
tgagctggggcttgactctt

SEQ ID NO: 17826 - RNA, 20 nt, synthetic construct
  source 1..20: mol_type = other RNA
tgagctttttgaaggaatag

SEQ ID NO: 17827 - RNA, 20 nt, synthetic construct
  source 1..20: mol_type = other RNA
tgaggaaagtctatccaggg

SEQ ID NO: 17828 - RNA, 20 nt, synthetic construct
  source 1..20: mol_type = other RNA
tgaggaattataataccaac

SEQ ID NO: 17829 - RNA, 20 nt, synthetic construct
  source 1..20: mol_type = other RNA
tgagggagggaagcactggt

SEQ ID NO: 17830 - RNA, 20 nt, synthetic construct
  source 1..20: mol_type = other RNA
tgaggttaggcaacatctcc

SEQ ID NO: 17831 - RNA, 20 nt, synthetic construct
  source 1..20: mol_type = other RNA
tgagtgagagttgctaagat

SEQ ID NO: 17832 - RNA, 20 nt, synthetic construct
  source 1..20: mol_type = other RNA
tgagttatagaaaacaatca

SEQ ID NO: 17833 - RNA, 20 nt, synthetic construct
  source 1..20: mol_type = other RNA
tgagttttataccatttgag

SEQ ID NO: 17834 - RNA, 20 nt, synthetic construct
  source 1..20: mol_type = other RNA
tgataagtagtgataatccg

SEQ ID NO: 17835 - RNA, 20 nt, synthetic construct
  source 1..20: mol_type = other RNA
tgatacaaatgaacccagcc

SEQ ID NO: 17836 - RNA, 20 nt, synthetic construct
  source 1..20: mol_type = other RNA
tgatagcttccaaattgctg

SEQ ID NO: 17837 - RNA, 20 nt, synthetic construct
  source 1..20: mol_type = other RNA
tgatatatttaactatgtag

SEQ ID NO: 17838 - RNA, 20 nt, synthetic construct
  source 1..20: mol_type = other RNA
tgatcacctgagttttatac

SEQ ID NO: 17839 - RNA, 20 nt, synthetic construct
  source 1..20: mol_type = other RNA
tgatcatgctttatgtctgt

SEQ ID NO: 17840 - RNA, 20 nt, synthetic construct
  source 1..20: mol_type = other RNA
tgatccatcttacatcttgt

SEQ ID NO: 17841 - RNA, 20 nt, synthetic construct
  source 1..20: mol_type = other RNA
tgatcccattttccatttgt

SEQ ID NO: 17842 - RNA, 20 nt, synthetic construct
  source 1..20: mol_type = other RNA
tgatctcagatgcctgtgtg

SEQ ID NO: 17843 - RNA, 20 nt, synthetic construct
  source 1..20: mol_type = other RNA
tgatcttgactactgcttta

SEQ ID NO: 17844 - RNA, 20 nt, synthetic construct
  source 1..20: mol_type = other RNA
tgatcttgggtagcctggtg

SEQ ID NO: 17845 - RNA, 20 nt, synthetic construct
  source 1..20: mol_type = other RNA
tgatgcataaggtccctgga

SEQ ID NO: 17846 - RNA, 20 nt, synthetic construct
  source 1..20: mol_type = other RNA
tgatgctacactttggtggt

SEQ ID NO: 17847 - RNA, 20 nt, synthetic construct
  source 1..20: mol_type = other RNA
tgatgcttagagctcctcca

SEQ ID NO: 17848 - RNA, 20 nt, synthetic construct
  source 1..20: mol_type = other RNA
tgatggttttctctttttac

SEQ ID NO: 17849 - RNA, 20 nt, synthetic construct
  source 1..20: mol_type = other RNA
tgatgtctagccaactttaa

SEQ ID NO: 17850 - RNA, 20 nt, synthetic construct
  source 1..20: mol_type = other RNA
tgattggaggagctctaagc

SEQ ID NO: 17851 - RNA, 20 nt, synthetic construct
  source 1..20: mol_type = other RNA
tgattgtcctaaaggaagat

SEQ ID NO: 17852 - RNA, 20 nt, synthetic construct
  source 1..20: mol_type = other RNA
tgattgttttctataactca

SEQ ID NO: 17853 - RNA, 20 nt, synthetic construct
  source 1..20: mol_type = other RNA
tgatttaaattaccttaact

SEQ ID NO: 17854 - RNA, 20 nt, synthetic construct
  source 1..20: mol_type = other RNA
tgatttgggtaactgcaatt

SEQ ID NO: 17855 - RNA, 20 nt, synthetic construct
  source 1..20: mol_type = other RNA
tgattttcattttatccttt

SEQ ID NO: 17856 - RNA, 20 nt, synthetic construct
  source 1..20: mol_type = other RNA
tgcaaaggggtagagagcct

SEQ ID NO: 17857 - RNA, 20 nt, synthetic construct
  source 1..20: mol_type = other RNA
tgcaacgagactgcggatta

SEQ ID NO: 17858 - RNA, 20 nt, synthetic construct
  source 1..20: mol_type = other RNA
tgcaactgtggacagtatag

SEQ ID NO: 17859 - RNA, 20 nt, synthetic construct
  source 1..20: mol_type = other RNA
tgcaagaactgtcttgggcc

SEQ ID NO: 17860 - RNA, 20 nt, synthetic construct
  source 1..20: mol_type = other RNA
tgcaattcattccatgtgac

SEQ ID NO: 17861 - RNA, 20 nt, synthetic construct
  source 1..20: mol_type = other RNA
tgcaccaccaaagtgtagca

SEQ ID NO: 17862 - RNA, 20 nt, synthetic construct
  source 1..20: mol_type = other RNA
tgcagattcaaatgtcatct

SEQ ID NO: 17863 - RNA, 20 nt, synthetic construct
  source 1..20: mol_type = other RNA
tgcagcaagggtctcaaatg

SEQ ID NO: 17864 - RNA, 20 nt, synthetic construct
  source 1..20: mol_type = other RNA
tgcaggattaaaagcagcaa

SEQ ID NO: 17865 - RNA, 20 nt, synthetic construct
  source 1..20: mol_type = other RNA
tgcagtgtggcccagggaag

SEQ ID NO: 17866 - RNA, 20 nt, synthetic construct
  source 1..20: mol_type = other RNA
tgcagttacccaaatcatag

SEQ ID NO: 17867 - RNA, 20 nt, synthetic construct
  source 1..20: mol_type = other RNA
tgcataaggtccctggatag

SEQ ID NO: 17868 - RNA, 20 nt, synthetic construct
  source 1..20: mol_type = other RNA
tgcataatgaattttaggga

SEQ ID NO: 17869 - RNA, 20 nt, synthetic construct
  source 1..20: mol_type = other RNA
tgcatcacattcacgagaac

SEQ ID NO: 17870 - RNA, 20 nt, synthetic construct
  source 1..20: mol_type = other RNA
tgcatccctaccaggcatct

SEQ ID NO: 17871 - RNA, 20 nt, synthetic construct
  source 1..20: mol_type = other RNA
tgcccttttaaaaaagcagt

SEQ ID NO: 17872 - RNA, 20 nt, synthetic construct
  source 1..20: mol_type = other RNA
tgcctaacctcagatccaat

SEQ ID NO: 17873 - RNA, 20 nt, synthetic construct
  source 1..20: mol_type = other RNA
tgcctgccttggacaacagt

SEQ ID NO: 17874 - RNA, 20 nt, synthetic construct
  source 1..20: mol_type = other RNA
tgcctggtagggatgcaaag

SEQ ID NO: 17875 - RNA, 20 nt, synthetic construct
  source 1..20: mol_type = other RNA
tgcctgtgtgatagcttcca

SEQ ID NO: 17876 - RNA, 20 nt, synthetic construct
  source 1..20: mol_type = other RNA
tgccttccatggtctgttgt

SEQ ID NO: 17877 - RNA, 20 nt, synthetic construct
  source 1..20: mol_type = other RNA
tgccttggacaacagtgaaa

SEQ ID NO: 17878 - RNA, 20 nt, synthetic construct
  source 1..20: mol_type = other RNA
tgcggattatcactacttat

SEQ ID NO: 17879 - RNA, 20 nt, synthetic construct
  source 1..20: mol_type = other RNA
tgcggcccgcgggttagaca

SEQ ID NO: 17880 - RNA, 20 nt, synthetic construct
  source 1..20: mol_type = other RNA
tgcgtgggtcatagtaattc

SEQ ID NO: 17881 - RNA, 20 nt, synthetic construct
  source 1..20: mol_type = other RNA
tgctaagatgcctggtaggg

SEQ ID NO: 17882 - RNA, 20 nt, synthetic construct
  source 1..20: mol_type = other RNA
tgctacactttggtggtgca

SEQ ID NO: 17883 - RNA, 20 nt, synthetic construct
  source 1..20: mol_type = other RNA
tgctacccttgctgctttta

SEQ ID NO: 17884 - RNA, 20 nt, synthetic construct
  source 1..20: mol_type = other RNA
tgctatgtctgaatactaga

SEQ ID NO: 17885 - RNA, 20 nt, synthetic construct
  source 1..20: mol_type = other RNA
tgctcaagattaataaaatg

SEQ ID NO: 17886 - RNA, 20 nt, synthetic construct
  source 1..20: mol_type = other RNA
tgctcaggagtcagaagaaa

SEQ ID NO: 17887 - RNA, 20 nt, synthetic construct
  source 1..20: mol_type = other RNA
tgctcagtaaaaagagaaaa

SEQ ID NO: 17888 - RNA, 20 nt, synthetic construct
  source 1..20: mol_type = other RNA
tgctcatcagctgtccttta

SEQ ID NO: 17889 - RNA, 20 nt, synthetic construct
  source 1..20: mol_type = other RNA
tgctccaaaaatgataagta

SEQ ID NO: 17890 - RNA, 20 nt, synthetic construct
  source 1..20: mol_type = other RNA
tgctcctctagtattcagac

SEQ ID NO: 17891 - RNA, 20 nt, synthetic construct
  source 1..20: mol_type = other RNA
tgctctatcttcctttagga

SEQ ID NO: 17892 - RNA, 20 nt, synthetic construct
  source 1..20: mol_type = other RNA
tgctgatttaaattacctta

SEQ ID NO: 17893 - RNA, 20 nt, synthetic construct
  source 1..20: mol_type = other RNA
tgctgcaccaccaaagtgta

SEQ ID NO: 17894 - RNA, 20 nt, synthetic construct
  source 1..20: mol_type = other RNA
tgctgcttttaatcctgcag

SEQ ID NO: 17895 - RNA, 20 nt, synthetic construct
  source 1..20: mol_type = other RNA
tgctgggtaagagtcaagcc

SEQ ID NO: 17896 - RNA, 20 nt, synthetic construct
  source 1..20: mol_type = other RNA
tgctgtaaacagtacaagcc

SEQ ID NO: 17897 - RNA, 20 nt, synthetic construct
  source 1..20: mol_type = other RNA
tgctgtctctgtctttagtg

SEQ ID NO: 17898 - RNA, 20 nt, synthetic construct
  source 1..20: mol_type = other RNA
tgcttagagctcctccaatc

SEQ ID NO: 17899 - RNA, 20 nt, synthetic construct
  source 1..20: mol_type = other RNA
tgcttccctccctcaccctc

SEQ ID NO: 17900 - RNA, 20 nt, synthetic construct
  source 1..20: mol_type = other RNA
tgcttgagaaaccagtgctt

SEQ ID NO: 17901 - RNA, 20 nt, synthetic construct
  source 1..20: mol_type = other RNA
tgctttacagagaattggat

SEQ ID NO: 17902 - RNA, 20 nt, synthetic construct
  source 1..20: mol_type = other RNA
tgctttatgtctgtctctag

SEQ ID NO: 17903 - RNA, 20 nt, synthetic construct
  source 1..20: mol_type = other RNA
tgctttcactgttgtccaag

SEQ ID NO: 17904 - RNA, 20 nt, synthetic construct
  source 1..20: mol_type = other RNA
tgcttttaatcctgcagatt

SEQ ID NO: 17905 - RNA, 20 nt, synthetic construct
  source 1..20: mol_type = other RNA
tgcttttattcctccctagt

SEQ ID NO: 17906 - RNA, 20 nt, synthetic construct
  source 1..20: mol_type = other RNA
tgctttttatattgctaata

SEQ ID NO: 17907 - RNA, 20 nt, synthetic construct
  source 1..20: mol_type = other RNA
tgcttttttaaaagggcagt

SEQ ID NO: 17908 - RNA, 20 nt, synthetic construct
  source 1..20: mol_type = other RNA
tggaaaagtggctggtatga

SEQ ID NO: 17909 - RNA, 20 nt, synthetic construct
  source 1..20: mol_type = other RNA
tggaaaatagtgaaaaatga

SEQ ID NO: 17910 - RNA, 20 nt, synthetic construct
  source 1..20: mol_type = other RNA
tggaaaatgggatcaagtat

SEQ ID NO: 17911 - RNA, 20 nt, synthetic construct
  source 1..20: mol_type = other RNA
tggaaacacttgattggagg

SEQ ID NO: 17912 - RNA, 20 nt, synthetic construct
  source 1..20: mol_type = other RNA
tggaaccaatctgtctggtt

SEQ ID NO: 17913 - RNA, 20 nt, synthetic construct
  source 1..20: mol_type = other RNA
tggaagctatcacacaggca

SEQ ID NO: 17914 - RNA, 20 nt, synthetic construct
  source 1..20: mol_type = other RNA
tggaaggcatgaccaaaggg

SEQ ID NO: 17915 - RNA, 20 nt, synthetic construct
  source 1..20: mol_type = other RNA
tggaatctcacctccctaaa

SEQ ID NO: 17916 - RNA, 20 nt, synthetic construct
  source 1..20: mol_type = other RNA
tggaatgaattgcagttacc

SEQ ID NO: 17917 - RNA, 20 nt, synthetic construct
  source 1..20: mol_type = other RNA
tggaatgctacccttgctgc

SEQ ID NO: 17918 - RNA, 20 nt, synthetic construct
  source 1..20: mol_type = other RNA
tggacaacagtgaaagcaag

SEQ ID NO: 17919 - RNA, 20 nt, synthetic construct
  source 1..20: mol_type = other RNA
tggacacccctggtttacag

SEQ ID NO: 17920 - RNA, 20 nt, synthetic construct
  source 1..20: mol_type = other RNA
tggacagtatagctgtagcc

SEQ ID NO: 17921 - RNA, 20 nt, synthetic construct
  source 1..20: mol_type = other RNA
tggacattgatggttttctc

SEQ ID NO: 17922 - RNA, 20 nt, synthetic construct
  source 1..20: mol_type = other RNA
tggactgtgaagacggtcag

SEQ ID NO: 17923 - RNA, 20 nt, synthetic construct
  source 1..20: mol_type = other RNA
tggacttagctttcagctaa

SEQ ID NO: 17924 - RNA, 20 nt, synthetic construct
  source 1..20: mol_type = other RNA
tggagcatttttctagagac

SEQ ID NO: 17925 - RNA, 20 nt, synthetic construct
  source 1..20: mol_type = other RNA
tggaggagctctaagcatca

SEQ ID NO: 17926 - RNA, 20 nt, synthetic construct
  source 1..20: mol_type = other RNA
tggagtgagcgacatgtaaa

SEQ ID NO: 17927 - RNA, 20 nt, synthetic construct
  source 1..20: mol_type = other RNA
tggagtttcacctgtcattt

SEQ ID NO: 17928 - RNA, 20 nt, synthetic construct
  source 1..20: mol_type = other RNA
tggatagactttcctcaatt

SEQ ID NO: 17929 - RNA, 20 nt, synthetic construct
  source 1..20: mol_type = other RNA
tggatcaaaagataacacta

SEQ ID NO: 17930 - RNA, 20 nt, synthetic construct
  source 1..20: mol_type = other RNA
tggatctgaggttaggcaac

SEQ ID NO: 17931 - RNA, 20 nt, synthetic construct
  source 1..20: mol_type = other RNA
tggattacagaatacgtgga

SEQ ID NO: 17932 - RNA, 20 nt, synthetic construct
  source 1..20: mol_type = other RNA
tggcccaagacagttcttgc

SEQ ID NO: 17933 - RNA, 20 nt, synthetic construct
  source 1..20: mol_type = other RNA
tggcccattacatttcattt

SEQ ID NO: 17934 - RNA, 20 nt, synthetic construct
  source 1..20: mol_type = other RNA
tggctagacatcagagtata

SEQ ID NO: 17935 - RNA, 20 nt, synthetic construct
  source 1..20: mol_type = other RNA
tggctggtatgactaaagaa

SEQ ID NO: 17936 - RNA, 20 nt, synthetic construct
  source 1..20: mol_type = other RNA
tggcttgtactgtttacagc

SEQ ID NO: 17937 - RNA, 20 nt, synthetic construct
  source 1..20: mol_type = other RNA
tgggacccaggacagctttg

SEQ ID NO: 17938 - RNA, 20 nt, synthetic construct
  source 1..20: mol_type = other RNA
tgggatcaagtatgagtgag

SEQ ID NO: 17939 - RNA, 20 nt, synthetic construct
  source 1..20: mol_type = other RNA
tgggattctgtccctgaccg

SEQ ID NO: 17940 - RNA, 20 nt, synthetic construct
  source 1..20: mol_type = other RNA
tgggccacactgcaagaact

SEQ ID NO: 17941 - RNA, 20 nt, synthetic construct
  source 1..20: mol_type = other RNA
tgggccacatataaaggaca

SEQ ID NO: 17942 - RNA, 20 nt, synthetic construct
  source 1..20: mol_type = other RNA
tgggccagagagcttcagct

SEQ ID NO: 17943 - RNA, 20 nt, synthetic construct
  source 1..20: mol_type = other RNA
tggggagagagggtgaggga

SEQ ID NO: 17944 - RNA, 20 nt, synthetic construct
  source 1..20: mol_type = other RNA
tggggcttgactcttaccca

SEQ ID NO: 17945 - RNA, 20 nt, synthetic construct
  source 1..20: mol_type = other RNA
tggggtggttctttttggaa

SEQ ID NO: 17946 - RNA, 20 nt, synthetic construct
  source 1..20: mol_type = other RNA
tggggttgttgtcattgctg

SEQ ID NO: 17947 - RNA, 20 nt, synthetic construct
  source 1..20: mol_type = other RNA
tgggtaactgcaattcattc

SEQ ID NO: 17948 - RNA, 20 nt, synthetic construct
  source 1..20: mol_type = other RNA
tgggtaagagtcaagcccca

SEQ ID NO: 17949 - RNA, 20 nt, synthetic construct
  source 1..20: mol_type = other RNA
tgggtagcctggtgtctcgc

SEQ ID NO: 17950 - RNA, 20 nt, synthetic construct
  source 1..20: mol_type = other RNA
tgggtcatagaacaacagac

SEQ ID NO: 17951 - RNA, 20 nt, synthetic construct
  source 1..20: mol_type = other RNA
tgggtcatagtaattctggg

SEQ ID NO: 17952 - RNA, 20 nt, synthetic construct
  source 1..20: mol_type = other RNA
tgggtcccatgcggcccgcg

SEQ ID NO: 17953 - RNA, 20 nt, synthetic construct
  source 1..20: mol_type = other RNA
tgggtcgcattcaaagctgt

SEQ ID NO: 17954 - RNA, 20 nt, synthetic construct
  source 1..20: mol_type = other RNA
tgggttcatttgtatcacac

SEQ ID NO: 17955 - RNA, 20 nt, synthetic construct
  source 1..20: mol_type = other RNA
tggtaagaacagaaatgaga

SEQ ID NO: 17956 - RNA, 20 nt, synthetic construct
  source 1..20: mol_type = other RNA
tggtagggatgcaaaggggt

SEQ ID NO: 17957 - RNA, 20 nt, synthetic construct
  source 1..20: mol_type = other RNA
tggtataaaactcaggtgat

SEQ ID NO: 17958 - RNA, 20 nt, synthetic construct
  source 1..20: mol_type = other RNA
tggtatgactaaagaactga

SEQ ID NO: 17959 - RNA, 20 nt, synthetic construct
  source 1..20: mol_type = other RNA
tggtattataattcctcagg

SEQ ID NO: 17960 - RNA, 20 nt, synthetic construct
  source 1..20: mol_type = other RNA
tggtcatgccttccatggtc

SEQ ID NO: 17961 - RNA, 20 nt, synthetic construct
  source 1..20: mol_type = other RNA
tggtctgttgttctatgacc

SEQ ID NO: 17962 - RNA, 20 nt, synthetic construct
  source 1..20: mol_type = other RNA
tggtgcagcaagggtctcaa

SEQ ID NO: 17963 - RNA, 20 nt, synthetic construct
  source 1..20: mol_type = other RNA
tggtggaaccaatctgtctg

SEQ ID NO: 17964 - RNA, 20 nt, synthetic construct
  source 1..20: mol_type = other RNA
tggtggtgcagcaagggtct

SEQ ID NO: 17965 - RNA, 20 nt, synthetic construct
  source 1..20: mol_type = other RNA
tggtgtctcgcgaaaccaga

SEQ ID NO: 17966 - RNA, 20 nt, synthetic construct
  source 1..20: mol_type = other RNA
tggtgttaaaatgttggtat

SEQ ID NO: 17967 - RNA, 20 nt, synthetic construct
  source 1..20: mol_type = other RNA
tggttccaccacaaattaag

SEQ ID NO: 17968 - RNA, 20 nt, synthetic construct
  source 1..20: mol_type = other RNA
tggttctttttggaatgcta

SEQ ID NO: 17969 - RNA, 20 nt, synthetic construct
  source 1..20: mol_type = other RNA
tggtttacaggatgaattct

SEQ ID NO: 17970 - RNA, 20 nt, synthetic construct
  source 1..20: mol_type = other RNA
tggtttcgcgagacaccagg

SEQ ID NO: 17971 - RNA, 20 nt, synthetic construct
  source 1..20: mol_type = other RNA
tggtttctcaagcaaaagct

SEQ ID NO: 17972 - RNA, 20 nt, synthetic construct
  source 1..20: mol_type = other RNA
tggtttgacattttattaat

SEQ ID NO: 17973 - RNA, 20 nt, synthetic construct
  source 1..20: mol_type = other RNA
tggtttgttggacttagctt

SEQ ID NO: 17974 - RNA, 20 nt, synthetic construct
  source 1..20: mol_type = other RNA
tggttttctctttttactga

SEQ ID NO: 17975 - RNA, 20 nt, synthetic construct
  source 1..20: mol_type = other RNA
tgtaaacagtacaagccagt

SEQ ID NO: 17976 - RNA, 20 nt, synthetic construct
  source 1..20: mol_type = other RNA
tgtaaaccaggggtgtccaa

SEQ ID NO: 17977 - RNA, 20 nt, synthetic construct
  source 1..20: mol_type = other RNA
tgtaaagcagtagtcaagat

SEQ ID NO: 17978 - RNA, 20 nt, synthetic construct
  source 1..20: mol_type = other RNA
tgtaaatgtctttatggttt

SEQ ID NO: 17979 - RNA, 20 nt, synthetic construct
  source 1..20: mol_type = other RNA
tgtaacagtttaatggaatc

SEQ ID NO: 17980 - RNA, 20 nt, synthetic construct
  source 1..20: mol_type = other RNA
tgtaagatggatcaaaagat

SEQ ID NO: 17981 - RNA, 20 nt, synthetic construct
  source 1..20: mol_type = other RNA
tgtaatccacagaacaagtc

SEQ ID NO: 17982 - RNA, 20 nt, synthetic construct
  source 1..20: mol_type = other RNA
tgtaatgggccagagagctt

SEQ ID NO: 17983 - RNA, 20 nt, synthetic construct
  source 1..20: mol_type = other RNA
tgtactcctgagctcctagt

SEQ ID NO: 17984 - RNA, 20 nt, synthetic construct
  source 1..20: mol_type = other RNA
tgtactgcgtgggtcatagt

SEQ ID NO: 17985 - RNA, 20 nt, synthetic construct
  source 1..20: mol_type = other RNA
tgtactgtttacagcaagtt

SEQ ID NO: 17986 - RNA, 20 nt, synthetic construct
  source 1..20: mol_type = other RNA
tgtacttgctcctctagtat

SEQ ID NO: 17987 - RNA, 20 nt, synthetic construct
  source 1..20: mol_type = other RNA
tgtagcatcaggttaaatct

SEQ ID NO: 17988 - RNA, 20 nt, synthetic construct
  source 1..20: mol_type = other RNA
tgtagccccggacttgttct

SEQ ID NO: 17989 - RNA, 20 nt, synthetic construct
  source 1..20: mol_type = other RNA
tgtagctcctgtaacagttt

SEQ ID NO: 17990 - RNA, 20 nt, synthetic construct
  source 1..20: mol_type = other RNA
tgtaggacagaaatttaggc

SEQ ID NO: 17991 - RNA, 20 nt, synthetic construct
  source 1..20: mol_type = other RNA
tgtagtatgtggaaaatagt

SEQ ID NO: 17992 - RNA, 20 nt, synthetic construct
  source 1..20: mol_type = other RNA
tgtatcacacagacctattc

SEQ ID NO: 17993 - RNA, 20 nt, synthetic construct
  source 1..20: mol_type = other RNA
tgtattagcaatataaaaag

SEQ ID NO: 17994 - RNA, 20 nt, synthetic construct
  source 1..20: mol_type = other RNA
tgtcaaaccataaagacatt

SEQ ID NO: 17995 - RNA, 20 nt, synthetic construct
  source 1..20: mol_type = other RNA
tgtcatctcccctttggtca

SEQ ID NO: 17996 - RNA, 20 nt, synthetic construct
  source 1..20: mol_type = other RNA
tgtcattgctgatttaaatt

SEQ ID NO: 17997 - RNA, 20 nt, synthetic construct
  source 1..20: mol_type = other RNA
tgtcattttcatgctctatc

SEQ ID NO: 17998 - RNA, 20 nt, synthetic construct
  source 1..20: mol_type = other RNA
tgtccaaggcaggcacatct

SEQ ID NO: 17999 - RNA, 20 nt, synthetic construct
  source 1..20: mol_type = other RNA
tgtccacagttgcaattcaa

SEQ ID NO: 18000 - RNA, 20 nt, synthetic construct
  source 1..20: mol_type = other RNA
tgtccacgtattctgtaatc

SEQ ID NO: 18001 - RNA, 20 nt, synthetic construct
  source 1..20: mol_type = other RNA
tgtccctgaccgtcttcaca

SEQ ID NO: 18002 - RNA, 20 nt, synthetic construct
  source 1..20: mol_type = other RNA
tgtcctaaaggaagatagag

SEQ ID NO: 18003 - RNA, 20 nt, synthetic construct
  source 1..20: mol_type = other RNA
tgtcctacaagttttcactt

SEQ ID NO: 18004 - RNA, 20 nt, synthetic construct
  source 1..20: mol_type = other RNA
tgtcctgggtcccatgcggc

SEQ ID NO: 18005 - RNA, 20 nt, synthetic construct
  source 1..20: mol_type = other RNA
tgtcctttatatgtggccca

SEQ ID NO: 18006 - RNA, 20 nt, synthetic construct
  source 1..20: mol_type = other RNA
tgtcgctcactccatttact

SEQ ID NO: 18007 - RNA, 20 nt, synthetic construct
  source 1..20: mol_type = other RNA
tgtctaacccgcgggccgca

SEQ ID NO: 18008 - RNA, 20 nt, synthetic construct
  source 1..20: mol_type = other RNA
tgtctagccaactttaagta

SEQ ID NO: 18009 - RNA, 20 nt, synthetic construct
  source 1..20: mol_type = other RNA
tgtctcgcgaaaccagacag

SEQ ID NO: 18010 - RNA, 20 nt, synthetic construct
  source 1..20: mol_type = other RNA
tgtctctagaaaaatgctcc

SEQ ID NO: 18011 - RNA, 20 nt, synthetic construct
  source 1..20: mol_type = other RNA
tgtctctgtctttagtgtta

SEQ ID NO: 18012 - RNA, 20 nt, synthetic construct
  source 1..20: mol_type = other RNA
tgtctgaatactagaggagc

SEQ ID NO: 18013 - RNA, 20 nt, synthetic construct
  source 1..20: mol_type = other RNA
tgtctggtttcgcgagacac

SEQ ID NO: 18014 - RNA, 20 nt, synthetic construct
  source 1..20: mol_type = other RNA
tgtctgtctctagaaaaatg

SEQ ID NO: 18015 - RNA, 20 nt, synthetic construct
  source 1..20: mol_type = other RNA
tgtcttgggccacatataaa

SEQ ID NO: 18016 - RNA, 20 nt, synthetic construct
  source 1..20: mol_type = other RNA
tgtcttgtactcctgagctc

SEQ ID NO: 18017 - RNA, 20 nt, synthetic construct
  source 1..20: mol_type = other RNA
tgtctttagtgttatctttt

SEQ ID NO: 18018 - RNA, 20 nt, synthetic construct
  source 1..20: mol_type = other RNA
tgtgaagacggtcagggaca

SEQ ID NO: 18019 - RNA, 20 nt, synthetic construct
  source 1..20: mol_type = other RNA
tgtgacttcaggagagaggt

SEQ ID NO: 18020 - RNA, 20 nt, synthetic construct
  source 1..20: mol_type = other RNA
tgtgatacaaatgaacccag

SEQ ID NO: 18021 - RNA, 20 nt, synthetic construct
  source 1..20: mol_type = other RNA
tgtgatagcttccaaattgc

SEQ ID NO: 18022 - RNA, 20 nt, synthetic construct
  source 1..20: mol_type = other RNA
tgtgatgcataaggtccctg

SEQ ID NO: 18023 - RNA, 20 nt, synthetic construct
  source 1..20: mol_type = other RNA
tgtgattgttttctataact

SEQ ID NO: 18024 - RNA, 20 nt, synthetic construct
  source 1..20: mol_type = other RNA
tgtgcctgccttggacaaca

SEQ ID NO: 18025 - RNA, 20 nt, synthetic construct
  source 1..20: mol_type = other RNA
tgtggaaaatagtgaaaaat

SEQ ID NO: 18026 - RNA, 20 nt, synthetic construct
  source 1..20: mol_type = other RNA
tgtggacagtatagctgtag

SEQ ID NO: 18027 - RNA, 20 nt, synthetic construct
  source 1..20: mol_type = other RNA
tgtggattacagaatacgtg

SEQ ID NO: 18028 - RNA, 20 nt, synthetic construct
  source 1..20: mol_type = other RNA
tgtggcccaagacagttctt

SEQ ID NO: 18029 - RNA, 20 nt, synthetic construct
  source 1..20: mol_type = other RNA
tgtggggtggttctttttgg

SEQ ID NO: 18030 - RNA, 20 nt, synthetic construct
  source 1..20: mol_type = other RNA
tgtggtggaaccaatctgtc

SEQ ID NO: 18031 - RNA, 20 nt, synthetic construct
  source 1..20: mol_type = other RNA
tgtgtagtatgtggaaaata

SEQ ID NO: 18032 - RNA, 20 nt, synthetic construct
  source 1..20: mol_type = other RNA
tgtgtgatacaaatgaaccc

SEQ ID NO: 18033 - RNA, 20 nt, synthetic construct
  source 1..20: mol_type = other RNA
tgtgtgatagcttccaaatt

SEQ ID NO: 18034 - RNA, 20 nt, synthetic construct
  source 1..20: mol_type = other RNA
tgtgtgtagtatgtggaaaa

SEQ ID NO: 18035 - RNA, 20 nt, synthetic construct
  source 1..20: mol_type = other RNA
tgtgtgtgtagtatgtggaa

SEQ ID NO: 18036 - RNA, 20 nt, synthetic construct
  source 1..20: mol_type = other RNA
tgttaaaatgttggtattat

SEQ ID NO: 18037 - RNA, 20 nt, synthetic construct
  source 1..20: mol_type = other RNA
tgttaaattgaggaaagtct

SEQ ID NO: 18038 - RNA, 20 nt, synthetic construct
  source 1..20: mol_type = other RNA
tgttacaggagctacatagt

SEQ ID NO: 18039 - RNA, 20 nt, synthetic construct
  source 1..20: mol_type = other RNA
tgttaggatgattgtcctaa

SEQ ID NO: 18040 - RNA, 20 nt, synthetic construct
  source 1..20: mol_type = other RNA
tgttatcttttgatccatct

SEQ ID NO: 18041 - RNA, 20 nt, synthetic construct
  source 1..20: mol_type = other RNA
tgttctatgacccaaactgc

SEQ ID NO: 18042 - RNA, 20 nt, synthetic construct
  source 1..20: mol_type = other RNA
tgttctcgtgaatgtgatgc

SEQ ID NO: 18043 - RNA, 20 nt, synthetic construct
  source 1..20: mol_type = other RNA
tgttctgtggattacagaat

SEQ ID NO: 18044 - RNA, 20 nt, synthetic construct
  source 1..20: mol_type = other RNA
tgttcttaccagttagtaac

SEQ ID NO: 18045 - RNA, 20 nt, synthetic construct
  source 1..20: mol_type = other RNA
tgttgcctaacctcagatcc

SEQ ID NO: 18046 - RNA, 20 nt, synthetic construct
  source 1..20: mol_type = other RNA
tgttggacttagctttcagc

SEQ ID NO: 18047 - RNA, 20 nt, synthetic construct
  source 1..20: mol_type = other RNA
tgttggtattataattcctc

SEQ ID NO: 18048 - RNA, 20 nt, synthetic construct
  source 1..20: mol_type = other RNA
tgttgtacttgctcctctag

SEQ ID NO: 18049 - RNA, 20 nt, synthetic construct
  source 1..20: mol_type = other RNA
tgttgtcattgctgatttaa

SEQ ID NO: 18050 - RNA, 20 nt, synthetic construct
  source 1..20: mol_type = other RNA
tgttgtccaaggcaggcaca

SEQ ID NO: 18051 - RNA, 20 nt, synthetic construct
  source 1..20: mol_type = other RNA
tgttgttctatgacccaaac

SEQ ID NO: 18052 - RNA, 20 nt, synthetic construct
  source 1..20: mol_type = other RNA
tgtttacagcaagttgtcta

SEQ ID NO: 18053 - RNA, 20 nt, synthetic construct
  source 1..20: mol_type = other RNA
tgtttccaggaagtgaaaac

SEQ ID NO: 18054 - RNA, 20 nt, synthetic construct
  source 1..20: mol_type = other RNA
tgttttctataactcaagat

SEQ ID NO: 18055 - RNA, 20 nt, synthetic construct
  source 1..20: mol_type = other RNA
ttaaaaaagcagttttcttc

SEQ ID NO: 18056 - RNA, 20 nt, synthetic construct
  source 1..20: mol_type = other RNA
ttaaaaatggtttgttggac

SEQ ID NO: 18057 - RNA, 20 nt, synthetic construct
  source 1..20: mol_type = other RNA
ttaaaagcagcaagggtagc

SEQ ID NO: 18058 - RNA, 20 nt, synthetic construct
  source 1..20: mol_type = other RNA
ttaaaagggcagtttgggtc

SEQ ID NO: 18059 - RNA, 20 nt, synthetic construct
  source 1..20: mol_type = other RNA
ttaaaatgttggtattataa

SEQ ID NO: 18060 - RNA, 20 nt, synthetic construct
  source 1..20: mol_type = other RNA
ttaaactgttacaggagcta

SEQ ID NO: 18061 - RNA, 20 nt, synthetic construct
  source 1..20: mol_type = other RNA
ttaaagatgtgcctgccttg

SEQ ID NO: 18062 - RNA, 20 nt, synthetic construct
  source 1..20: mol_type = other RNA
ttaaagttggctagacatca

SEQ ID NO: 18063 - RNA, 20 nt, synthetic construct
  source 1..20: mol_type = other RNA
ttaaatcagcaatgacaaca

SEQ ID NO: 18064 - RNA, 20 nt, synthetic construct
  source 1..20: mol_type = other RNA
ttaaatgaaatgtaatgggc

SEQ ID NO: 18065 - RNA, 20 nt, synthetic construct
  source 1..20: mol_type = other RNA
ttaaattaccttaactattc

SEQ ID NO: 18066 - RNA, 20 nt, synthetic construct
  source 1..20: mol_type = other RNA
ttaaattgaggaaagtctat

SEQ ID NO: 18067 - RNA, 20 nt, synthetic construct
  source 1..20: mol_type = other RNA
ttaacaccaaatgcttttta

SEQ ID NO: 18068 - RNA, 20 nt, synthetic construct
  source 1..20: mol_type = other RNA
ttaacctgatgctacacttt

SEQ ID NO: 18069 - RNA, 20 nt, synthetic construct
  source 1..20: mol_type = other RNA
ttaacgcttgctttcactgt

SEQ ID NO: 18070 - RNA, 20 nt, synthetic construct
  source 1..20: mol_type = other RNA
ttaactatgtagctcctgta

SEQ ID NO: 18071 - RNA, 20 nt, synthetic construct
  source 1..20: mol_type = other RNA
ttaactattctgagcttttt

SEQ ID NO: 18072 - RNA, 20 nt, synthetic construct
  source 1..20: mol_type = other RNA
ttaagaacgtgaactaggga

SEQ ID NO: 18073 - RNA, 20 nt, synthetic construct
  source 1..20: mol_type = other RNA
ttaagatttaacctgatgct

SEQ ID NO: 18074 - RNA, 20 nt, synthetic construct
  source 1..20: mol_type = other RNA
ttaaggcttgagctggggct

SEQ ID NO: 18075 - RNA, 20 nt, synthetic construct
  source 1..20: mol_type = other RNA
ttaaggtaatttaaatcagc

SEQ ID NO: 18076 - RNA, 20 nt, synthetic construct
  source 1..20: mol_type = other RNA
ttaagtaaatggagtgagcg

SEQ ID NO: 18077 - RNA, 20 nt, synthetic construct
  source 1..20: mol_type = other RNA
ttaatcctgcagattcaaat

SEQ ID NO: 18078 - RNA, 20 nt, synthetic construct
  source 1..20: mol_type = other RNA
ttaatcttgagcattggaaa

SEQ ID NO: 18079 - RNA, 20 nt, synthetic construct
  source 1..20: mol_type = other RNA
ttaatggaatctcacctccc

SEQ ID NO: 18080 - RNA, 20 nt, synthetic construct
  source 1..20: mol_type = other RNA
ttaatttgtggtggaaccaa

SEQ ID NO: 18081 - RNA, 20 nt, synthetic construct
  source 1..20: mol_type = other RNA
ttacagaatacgtggacatt

SEQ ID NO: 18082 - RNA, 20 nt, synthetic construct
  source 1..20: mol_type = other RNA
ttacagagaattggatctga

SEQ ID NO: 18083 - RNA, 20 nt, synthetic construct
  source 1..20: mol_type = other RNA
ttacagcaagttgtctaacc

SEQ ID NO: 18084 - RNA, 20 nt, synthetic construct
  source 1..20: mol_type = other RNA
ttacaggagctacatagtta

SEQ ID NO: 18085 - RNA, 20 nt, synthetic construct
  source 1..20: mol_type = other RNA
ttacaggatgaattctgttc

SEQ ID NO: 18086 - RNA, 20 nt, synthetic construct
  source 1..20: mol_type = other RNA
ttacatcttgttaggatgat

SEQ ID NO: 18087 - RNA, 20 nt, synthetic construct
  source 1..20: mol_type = other RNA
ttacatgtcgctcactccat

SEQ ID NO: 18088 - RNA, 20 nt, synthetic construct
  source 1..20: mol_type = other RNA
ttacatttcatttaactgct

SEQ ID NO: 18089 - RNA, 20 nt, synthetic construct
  source 1..20: mol_type = other RNA
ttaccagttagtaactgatc

SEQ ID NO: 18090 - RNA, 20 nt, synthetic construct
  source 1..20: mol_type = other RNA
ttacccaaatcatagagacg

SEQ ID NO: 18091 - RNA, 20 nt, synthetic construct
  source 1..20: mol_type = other RNA
ttacccagcagtgcttttat

SEQ ID NO: 18092 - RNA, 20 nt, synthetic construct
  source 1..20: mol_type = other RNA
ttaccttaactattctgagc

SEQ ID NO: 18093 - RNA, 20 nt, synthetic construct
  source 1..20: mol_type = other RNA
ttactaactggtaagaacag

SEQ ID NO: 18094 - RNA, 20 nt, synthetic construct
  source 1..20: mol_type = other RNA
ttactatgacccacgcagta

SEQ ID NO: 18095 - RNA, 20 nt, synthetic construct
  source 1..20: mol_type = other RNA
ttactgagcagtaaggaaat

SEQ ID NO: 18096 - RNA, 20 nt, synthetic construct
  source 1..20: mol_type = other RNA
ttactgctcagtaaaaagag

SEQ ID NO: 18097 - RNA, 20 nt, synthetic construct
  source 1..20: mol_type = other RNA
ttactggcttgtactgttta

SEQ ID NO: 18098 - RNA, 20 nt, synthetic construct
  source 1..20: mol_type = other RNA
ttacttaaagttggctagac

SEQ ID NO: 18099 - RNA, 20 nt, synthetic construct
  source 1..20: mol_type = other RNA
ttactttgtgattgttttct

SEQ ID NO: 18100 - RNA, 20 nt, synthetic construct
  source 1..20: mol_type = other RNA
ttagacaacttgctgtaaac

SEQ ID NO: 18101 - RNA, 20 nt, synthetic construct
  source 1..20: mol_type = other RNA
ttagagctcctccaatcaag

SEQ ID NO: 18102 - RNA, 20 nt, synthetic construct
  source 1..20: mol_type = other RNA
ttagaggaagaaaaagggag

SEQ ID NO: 18103 - RNA, 20 nt, synthetic construct
  source 1..20: mol_type = other RNA
ttagcaactctcactcatac

SEQ ID NO: 18104 - RNA, 20 nt, synthetic construct
  source 1..20: mol_type = other RNA
ttagcaatataaaaagcatt

SEQ ID NO: 18105 - RNA, 20 nt, synthetic construct
  source 1..20: mol_type = other RNA
ttagctgaaagctaagtcca

SEQ ID NO: 18106 - RNA, 20 nt, synthetic construct
  source 1..20: mol_type = other RNA
ttagctgggattctgtccct

SEQ ID NO: 18107 - RNA, 20 nt, synthetic construct
  source 1..20: mol_type = other RNA
ttagcttttgcttgagaaac

SEQ ID NO: 18108 - RNA, 20 nt, synthetic construct
  source 1..20: mol_type = other RNA
ttaggacaatcatcctaaca

SEQ ID NO: 18109 - RNA, 20 nt, synthetic construct
  source 1..20: mol_type = other RNA
ttaggatgattgtcctaaag

SEQ ID NO: 18110 - RNA, 20 nt, synthetic construct
  source 1..20: mol_type = other RNA
ttaggcaacatctccctttt

SEQ ID NO: 18111 - RNA, 20 nt, synthetic construct
  source 1..20: mol_type = other RNA
ttaggctgggttcatttgta

SEQ ID NO: 18112 - RNA, 20 nt, synthetic construct
  source 1..20: mol_type = other RNA
ttagggaggtgagattccat

SEQ ID NO: 18113 - RNA, 20 nt, synthetic construct
  source 1..20: mol_type = other RNA
ttagtaactgatctcagatg

SEQ ID NO: 18114 - RNA, 20 nt, synthetic construct
  source 1..20: mol_type = other RNA
ttagtcataccagccacttt

SEQ ID NO: 18115 - RNA, 20 nt, synthetic construct
  source 1..20: mol_type = other RNA
ttagtgttatcttttgatcc

SEQ ID NO: 18116 - RNA, 20 nt, synthetic construct
  source 1..20: mol_type = other RNA
ttataattcctcaggataaa

SEQ ID NO: 18117 - RNA, 20 nt, synthetic construct
  source 1..20: mol_type = other RNA
ttataccatttgagaccctt

SEQ ID NO: 18118 - RNA, 20 nt, synthetic construct
  source 1..20: mol_type = other RNA
ttatatatttagctgaaagc

SEQ ID NO: 18119 - RNA, 20 nt, synthetic construct
  source 1..20: mol_type = other RNA
ttatatgtggcccaagacag

SEQ ID NO: 18120 - RNA, 20 nt, synthetic construct
  source 1..20: mol_type = other RNA
ttatcactacttatcatttt

SEQ ID NO: 18121 - RNA, 20 nt, synthetic construct
  source 1..20: mol_type = other RNA
ttatcatttttggagcattt

SEQ ID NO: 18122 - RNA, 20 nt, synthetic construct
  source 1..20: mol_type = other RNA
ttatcctgaggaattataat

SEQ ID NO: 18123 - RNA, 20 nt, synthetic construct
  source 1..20: mol_type = other RNA
ttatcctttttccttagctg

SEQ ID NO: 18124 - RNA, 20 nt, synthetic construct
  source 1..20: mol_type = other RNA
ttatctaatttgaattgcaa

SEQ ID NO: 18125 - RNA, 20 nt, synthetic construct
  source 1..20: mol_type = other RNA
ttatcttttgatccatctta

SEQ ID NO: 18126 - RNA, 20 nt, synthetic construct
  source 1..20: mol_type = other RNA
ttatgcatcacattcacgag

SEQ ID NO: 18127 - RNA, 20 nt, synthetic construct
  source 1..20: mol_type = other RNA
ttatgtctgtctctagaaaa

SEQ ID NO: 18128 - RNA, 20 nt, synthetic construct
  source 1..20: mol_type = other RNA
ttattaatcttgagcattgg

SEQ ID NO: 18129 - RNA, 20 nt, synthetic construct
  source 1..20: mol_type = other RNA
ttattcctccctagttcacg

SEQ ID NO: 18130 - RNA, 20 nt, synthetic construct
  source 1..20: mol_type = other RNA
ttatttccttactgctcagt

SEQ ID NO: 18131 - RNA, 20 nt, synthetic construct
  source 1..20: mol_type = other RNA
ttcaaaaagctcagaatagt

SEQ ID NO: 18132 - RNA, 20 nt, synthetic construct
  source 1..20: mol_type = other RNA
ttcaaagctgtcctgggtcc

SEQ ID NO: 18133 - RNA, 20 nt, synthetic construct
  source 1..20: mol_type = other RNA
ttcaaatgtcatctcccctt

SEQ ID NO: 18134 - RNA, 20 nt, synthetic construct
  source 1..20: mol_type = other RNA
ttcacagtccaggtgatctt

SEQ ID NO: 18135 - RNA, 20 nt, synthetic construct
  source 1..20: mol_type = other RNA
ttcacctgtcattttcatgc

SEQ ID NO: 18136 - RNA, 20 nt, synthetic construct
  source 1..20: mol_type = other RNA
ttcacgagaacagaattcat

SEQ ID NO: 18137 - RNA, 20 nt, synthetic construct
  source 1..20: mol_type = other RNA
ttcacgttcttaaatgttta

SEQ ID NO: 18138 - RNA, 20 nt, synthetic construct
  source 1..20: mol_type = other RNA
ttcactattttccacatact

SEQ ID NO: 18139 - RNA, 20 nt, synthetic construct
  source 1..20: mol_type = other RNA
ttcactgttgtccaaggcag

SEQ ID NO: 18140 - RNA, 20 nt, synthetic construct
  source 1..20: mol_type = other RNA
ttcacttcctggaaacactt

SEQ ID NO: 18141 - RNA, 20 nt, synthetic construct
  source 1..20: mol_type = other RNA
ttcagacatagcactagctt

SEQ ID NO: 18142 - RNA, 20 nt, synthetic construct
  source 1..20: mol_type = other RNA
ttcagcttttatttccttac

SEQ ID NO: 18143 - RNA, 20 nt, synthetic construct
  source 1..20: mol_type = other RNA
ttcaggagagaggtcatatt

SEQ ID NO: 18144 - RNA, 20 nt, synthetic construct
  source 1..20: mol_type = other RNA
ttcagttctttagtcatacc

SEQ ID NO: 18145 - RNA, 20 nt, synthetic construct
  source 1..20: mol_type = other RNA
ttcatcctgtaaaccagggg

SEQ ID NO: 18146 - RNA, 20 nt, synthetic construct
  source 1..20: mol_type = other RNA
ttcatgctctatcttccttt

SEQ ID NO: 18147 - RNA, 20 nt, synthetic construct
  source 1..20: mol_type = other RNA
ttcattccatgtgacttcag

SEQ ID NO: 18148 - RNA, 20 nt, synthetic construct
  source 1..20: mol_type = other RNA
ttcatttgtatcacacagac

SEQ ID NO: 18149 - RNA, 20 nt, synthetic construct
  source 1..20: mol_type = other RNA
ttcattttatcctttttcct

SEQ ID NO: 18150 - RNA, 20 nt, synthetic construct
  source 1..20: mol_type = other RNA
ttcatttttcactattttcc

SEQ ID NO: 18151 - RNA, 20 nt, synthetic construct
  source 1..20: mol_type = other RNA
ttccaaaaagaaccacccca

SEQ ID NO: 18152 - RNA, 20 nt, synthetic construct
  source 1..20: mol_type = other RNA
ttccaaattgctgtctctgt

SEQ ID NO: 18153 - RNA, 20 nt, synthetic construct
  source 1..20: mol_type = other RNA
ttccaatgctcaagattaat

SEQ ID NO: 18154 - RNA, 20 nt, synthetic construct
  source 1..20: mol_type = other RNA
ttccacatactacacacaca

SEQ ID NO: 18155 - RNA, 20 nt, synthetic construct
  source 1..20: mol_type = other RNA
ttccaccacaaattaaggct

SEQ ID NO: 18156 - RNA, 20 nt, synthetic construct
  source 1..20: mol_type = other RNA
ttccaggaagtgaaaacttg

SEQ ID NO: 18157 - RNA, 20 nt, synthetic construct
  source 1..20: mol_type = other RNA
ttccatggtctgttgttcta

SEQ ID NO: 18158 - RNA, 20 nt, synthetic construct
  source 1..20: mol_type = other RNA
ttccatgtgacttcaggaga

SEQ ID NO: 18159 - RNA, 20 nt, synthetic construct
  source 1..20: mol_type = other RNA
ttccattaaactgttacagg

SEQ ID NO: 18160 - RNA, 20 nt, synthetic construct
  source 1..20: mol_type = other RNA
ttccatttgttgtacttgct

SEQ ID NO: 18161 - RNA, 20 nt, synthetic construct
  source 1..20: mol_type = other RNA
ttccctccctcaccctctct

SEQ ID NO: 18162 - RNA, 20 nt, synthetic construct
  source 1..20: mol_type = other RNA
ttccctgggccacactgcaa

SEQ ID NO: 18163 - RNA, 20 nt, synthetic construct
  source 1..20: mol_type = other RNA
ttcctcaatttaacagcttt

SEQ ID NO: 18164 - RNA, 20 nt, synthetic construct
  source 1..20: mol_type = other RNA
ttcctcaggataaaacttac

SEQ ID NO: 18165 - RNA, 20 nt, synthetic construct
  source 1..20: mol_type = other RNA
ttcctccctagttcacgttc

SEQ ID NO: 18166 - RNA, 20 nt, synthetic construct
  source 1..20: mol_type = other RNA
ttcctctaaatacctctcat

SEQ ID NO: 18167 - RNA, 20 nt, synthetic construct
  source 1..20: mol_type = other RNA
ttcctggaaacacttgattg

SEQ ID NO: 18168 - RNA, 20 nt, synthetic construct
  source 1..20: mol_type = other RNA
ttccttactgctcagtaaaa

SEQ ID NO: 18169 - RNA, 20 nt, synthetic construct
  source 1..20: mol_type = other RNA
ttccttagctgggattctgt

SEQ ID NO: 18170 - RNA, 20 nt, synthetic construct
  source 1..20: mol_type = other RNA
ttccttcaaaaagctcagaa

SEQ ID NO: 18171 - RNA, 20 nt, synthetic construct
  source 1..20: mol_type = other RNA
ttcctttaggacaatcatcc

SEQ ID NO: 18172 - RNA, 20 nt, synthetic construct
  source 1..20: mol_type = other RNA
ttcgcgagacaccaggctac

SEQ ID NO: 18173 - RNA, 20 nt, synthetic construct
  source 1..20: mol_type = other RNA
ttcggcttccctgggccaca

SEQ ID NO: 18174 - RNA, 20 nt, synthetic construct
  source 1..20: mol_type = other RNA
ttcgtaaactttcttaaagt

SEQ ID NO: 18175 - RNA, 20 nt, synthetic construct
  source 1..20: mol_type = other RNA
ttctagagacagacataaag

SEQ ID NO: 18176 - RNA, 20 nt, synthetic construct
  source 1..20: mol_type = other RNA
ttctataactcaagatatga

SEQ ID NO: 18177 - RNA, 20 nt, synthetic construct
  source 1..20: mol_type = other RNA
ttctatgacccaaactgccc

SEQ ID NO: 18178 - RNA, 20 nt, synthetic construct
  source 1..20: mol_type = other RNA
ttctattaagatttaacctg

SEQ ID NO: 18179 - RNA, 20 nt, synthetic construct
  source 1..20: mol_type = other RNA
ttctcaagcaaaagctaaaa

SEQ ID NO: 18180 - RNA, 20 nt, synthetic construct
  source 1..20: mol_type = other RNA
ttctccctctcttgatcttg

SEQ ID NO: 18181 - RNA, 20 nt, synthetic construct
  source 1..20: mol_type = other RNA
ttctcgtgaatgtgatgcat

SEQ ID NO: 18182 - RNA, 20 nt, synthetic construct
  source 1..20: mol_type = other RNA
ttctctgtaaagcagtagtc

SEQ ID NO: 18183 - RNA, 20 nt, synthetic construct
  source 1..20: mol_type = other RNA
ttctctttttactgagcagt

SEQ ID NO: 18184 - RNA, 20 nt, synthetic construct
  source 1..20: mol_type = other RNA
ttctgactcctgagcagttt

SEQ ID NO: 18185 - RNA, 20 nt, synthetic construct
  source 1..20: mol_type = other RNA
ttctgagctttttgaaggaa

SEQ ID NO: 18186 - RNA, 20 nt, synthetic construct
  source 1..20: mol_type = other RNA
ttctgatatatttaactatg

SEQ ID NO: 18187 - RNA, 20 nt, synthetic construct
  source 1..20: mol_type = other RNA
ttctggggttgttgtcattg

SEQ ID NO: 18188 - RNA, 20 nt, synthetic construct
  source 1..20: mol_type = other RNA
ttctgtaatccacagaacaa

SEQ ID NO: 18189 - RNA, 20 nt, synthetic construct
  source 1..20: mol_type = other RNA
ttctgtccctgaccgtcttc

SEQ ID NO: 18190 - RNA, 20 nt, synthetic construct
  source 1..20: mol_type = other RNA
ttctgtcctacaagttttca

SEQ ID NO: 18191 - RNA, 20 nt, synthetic construct
  source 1..20: mol_type = other RNA
ttctgtggattacagaatac

SEQ ID NO: 18192 - RNA, 20 nt, synthetic construct
  source 1..20: mol_type = other RNA
ttctgttctcgtgaatgtga

SEQ ID NO: 18193 - RNA, 20 nt, synthetic construct
  source 1..20: mol_type = other RNA
ttctgttcttaccagttagt

SEQ ID NO: 18194 - RNA, 20 nt, synthetic construct
  source 1..20: mol_type = other RNA
ttcttaccagttagtaactg

SEQ ID NO: 18195 - RNA, 20 nt, synthetic construct
  source 1..20: mol_type = other RNA
ttcttcctctaaatacctct

SEQ ID NO: 18196 - RNA, 20 nt, synthetic construct
  source 1..20: mol_type = other RNA
ttcttctgactcctgagcag

SEQ ID NO: 18197 - RNA, 20 nt, synthetic construct
  source 1..20: mol_type = other RNA
ttcttgcagtgtggcccagg

SEQ ID NO: 18198 - RNA, 20 nt, synthetic construct
  source 1..20: mol_type = other RNA
ttctttagtcataccagcca

SEQ ID NO: 18199 - RNA, 20 nt, synthetic construct
  source 1..20: mol_type = other RNA
ttctttttggaatgctaccc

SEQ ID NO: 18200 - RNA, 20 nt, synthetic construct
  source 1..20: mol_type = other RNA
ttgaaatccaaactcattaa

SEQ ID NO: 18201 - RNA, 20 nt, synthetic construct
  source 1..20: mol_type = other RNA
ttgaaggaatagtgtcttgt

SEQ ID NO: 18202 - RNA, 20 nt, synthetic construct
  source 1..20: mol_type = other RNA
ttgaatctgcaggattaaaa

SEQ ID NO: 18203 - RNA, 20 nt, synthetic construct
  source 1..20: mol_type = other RNA
ttgaatgaagaataggtctg

SEQ ID NO: 18204 - RNA, 20 nt, synthetic construct
  source 1..20: mol_type = other RNA
ttgaattgcaactgtggaca

SEQ ID NO: 18205 - RNA, 20 nt, synthetic construct
  source 1..20: mol_type = other RNA
ttgacattttattaatcttg

SEQ ID NO: 18206 - RNA, 20 nt, synthetic construct
  source 1..20: mol_type = other RNA
ttgactactgctttacagag

SEQ ID NO: 18207 - RNA, 20 nt, synthetic construct
  source 1..20: mol_type = other RNA
ttgactcttacccagcagtg

SEQ ID NO: 18208 - RNA, 20 nt, synthetic construct
  source 1..20: mol_type = other RNA
ttgagaaaccagtgcttccc

SEQ ID NO: 18209 - RNA, 20 nt, synthetic construct
  source 1..20: mol_type = other RNA
ttgagacccttgctgcacca

SEQ ID NO: 18210 - RNA, 20 nt, synthetic construct
  source 1..20: mol_type = other RNA
ttgagcattggaaaagtggc

SEQ ID NO: 18211 - RNA, 20 nt, synthetic construct
  source 1..20: mol_type = other RNA
ttgagctggggcttgactct

SEQ ID NO: 18212 - RNA, 20 nt, synthetic construct
  source 1..20: mol_type = other RNA
ttgaggaaagtctatccagg

SEQ ID NO: 18213 - RNA, 20 nt, synthetic construct
  source 1..20: mol_type = other RNA
ttgagttatagaaaacaatc

SEQ ID NO: 18214 - RNA, 20 nt, synthetic construct
  source 1..20: mol_type = other RNA
ttgatccatcttacatcttg

SEQ ID NO: 18215 - RNA, 20 nt, synthetic construct
  source 1..20: mol_type = other RNA
ttgatcccattttccatttg

SEQ ID NO: 18216 - RNA, 20 nt, synthetic construct
  source 1..20: mol_type = other RNA
ttgatcttgggtagcctggt

SEQ ID NO: 18217 - RNA, 20 nt, synthetic construct
  source 1..20: mol_type = other RNA
ttgatggttttctcttttta

SEQ ID NO: 18218 - RNA, 20 nt, synthetic construct
  source 1..20: mol_type = other RNA
ttgattggaggagctctaag

SEQ ID NO: 18219 - RNA, 20 nt, synthetic construct
  source 1..20: mol_type = other RNA
ttgcaactgtggacagtata

SEQ ID NO: 18220 - RNA, 20 nt, synthetic construct
  source 1..20: mol_type = other RNA
ttgcagtgtggcccagggaa

SEQ ID NO: 18221 - RNA, 20 nt, synthetic construct
  source 1..20: mol_type = other RNA
ttgcagttacccaaatcata

SEQ ID NO: 18222 - RNA, 20 nt, synthetic construct
  source 1..20: mol_type = other RNA
ttgcatccctaccaggcatc

SEQ ID NO: 18223 - RNA, 20 nt, synthetic construct
  source 1..20: mol_type = other RNA
ttgcctaacctcagatccaa

SEQ ID NO: 18224 - RNA, 20 nt, synthetic construct
  source 1..20: mol_type = other RNA
ttgctaagatgcctggtagg

SEQ ID NO: 18225 - RNA, 20 nt, synthetic construct
  source 1..20: mol_type = other RNA
ttgctcatcagctgtccttt

SEQ ID NO: 18226 - RNA, 20 nt, synthetic construct
  source 1..20: mol_type = other RNA
ttgctcctctagtattcaga

SEQ ID NO: 18227 - RNA, 20 nt, synthetic construct
  source 1..20: mol_type = other RNA
ttgctgatttaaattacctt

SEQ ID NO: 18228 - RNA, 20 nt, synthetic construct
  source 1..20: mol_type = other RNA
ttgctgcaccaccaaagtgt

SEQ ID NO: 18229 - RNA, 20 nt, synthetic construct
  source 1..20: mol_type = other RNA
ttgctgcttttaatcctgca

SEQ ID NO: 18230 - RNA, 20 nt, synthetic construct
  source 1..20: mol_type = other RNA
ttgctgtaaacagtacaagc

SEQ ID NO: 18231 - RNA, 20 nt, synthetic construct
  source 1..20: mol_type = other RNA
ttgctgtctctgtctttagt

SEQ ID NO: 18232 - RNA, 20 nt, synthetic construct
  source 1..20: mol_type = other RNA
ttgcttgagaaaccagtgct

SEQ ID NO: 18233 - RNA, 20 nt, synthetic construct
  source 1..20: mol_type = other RNA
ttgctttcactgttgtccaa

SEQ ID NO: 18234 - RNA, 20 nt, synthetic construct
  source 1..20: mol_type = other RNA
ttggaaaagtggctggtatg

SEQ ID NO: 18235 - RNA, 20 nt, synthetic construct
  source 1..20: mol_type = other RNA
ttggaagctatcacacaggc

SEQ ID NO: 18236 - RNA, 20 nt, synthetic construct
  source 1..20: mol_type = other RNA
ttggaatgctacccttgctg

SEQ ID NO: 18237 - RNA, 20 nt, synthetic construct
  source 1..20: mol_type = other RNA
ttggacaacagtgaaagcaa

SEQ ID NO: 18238 - RNA, 20 nt, synthetic construct
  source 1..20: mol_type = other RNA
ttggacacccctggtttaca

SEQ ID NO: 18239 - RNA, 20 nt, synthetic construct
  source 1..20: mol_type = other RNA
ttggacttagctttcagcta

SEQ ID NO: 18240 - RNA, 20 nt, synthetic construct
  source 1..20: mol_type = other RNA
ttggagcatttttctagaga

SEQ ID NO: 18241 - RNA, 20 nt, synthetic construct
  source 1..20: mol_type = other RNA
ttggaggagctctaagcatc

SEQ ID NO: 18242 - RNA, 20 nt, synthetic construct
  source 1..20: mol_type = other RNA
ttggatctgaggttaggcaa

SEQ ID NO: 18243 - RNA, 20 nt, synthetic construct
  source 1..20: mol_type = other RNA
ttggctagacatcagagtat

SEQ ID NO: 18244 - RNA, 20 nt, synthetic construct
  source 1..20: mol_type = other RNA
ttgggccacatataaaggac

SEQ ID NO: 18245 - RNA, 20 nt, synthetic construct
  source 1..20: mol_type = other RNA
ttgggtaactgcaattcatt

SEQ ID NO: 18246 - RNA, 20 nt, synthetic construct
  source 1..20: mol_type = other RNA
ttgggtagcctggtgtctcg

SEQ ID NO: 18247 - RNA, 20 nt, synthetic construct
  source 1..20: mol_type = other RNA
ttgggtcatagaacaacaga

SEQ ID NO: 18248 - RNA, 20 nt, synthetic construct
  source 1..20: mol_type = other RNA
ttgggtcgcattcaaagctg

SEQ ID NO: 18249 - RNA, 20 nt, synthetic construct
  source 1..20: mol_type = other RNA
ttggtattataattcctcag

SEQ ID NO: 18250 - RNA, 20 nt, synthetic construct
  source 1..20: mol_type = other RNA
ttggtcatgccttccatggt

SEQ ID NO: 18251 - RNA, 20 nt, synthetic construct
  source 1..20: mol_type = other RNA
ttggtggtgcagcaagggtc

SEQ ID NO: 18252 - RNA, 20 nt, synthetic construct
  source 1..20: mol_type = other RNA
ttggttccaccacaaattaa

SEQ ID NO: 18253 - RNA, 20 nt, synthetic construct
  source 1..20: mol_type = other RNA
ttgtactcctgagctcctag

SEQ ID NO: 18254 - RNA, 20 nt, synthetic construct
  source 1..20: mol_type = other RNA
ttgtactgcgtgggtcatag

SEQ ID NO: 18255 - RNA, 20 nt, synthetic construct
  source 1..20: mol_type = other RNA
ttgtactgtttacagcaagt

SEQ ID NO: 18256 - RNA, 20 nt, synthetic construct
  source 1..20: mol_type = other RNA
ttgtacttgctcctctagta

SEQ ID NO: 18257 - RNA, 20 nt, synthetic construct
  source 1..20: mol_type = other RNA
ttgtaggacagaaatttagg

SEQ ID NO: 18258 - RNA, 20 nt, synthetic construct
  source 1..20: mol_type = other RNA
ttgtatcacacagacctatt

SEQ ID NO: 18259 - RNA, 20 nt, synthetic construct
  source 1..20: mol_type = other RNA
ttgtcattgctgatttaaat

SEQ ID NO: 18260 - RNA, 20 nt, synthetic construct
  source 1..20: mol_type = other RNA
ttgtccaaggcaggcacatc

SEQ ID NO: 18261 - RNA, 20 nt, synthetic construct
  source 1..20: mol_type = other RNA
ttgtcctaaaggaagataga

SEQ ID NO: 18262 - RNA, 20 nt, synthetic construct
  source 1..20: mol_type = other RNA
ttgtctaacccgcgggccgc

SEQ ID NO: 18263 - RNA, 20 nt, synthetic construct
  source 1..20: mol_type = other RNA
ttgtgattgttttctataac

SEQ ID NO: 18264 - RNA, 20 nt, synthetic construct
  source 1..20: mol_type = other RNA
ttgtggggtggttctttttg

SEQ ID NO: 18265 - RNA, 20 nt, synthetic construct
  source 1..20: mol_type = other RNA
ttgtggtggaaccaatctgt

SEQ ID NO: 18266 - RNA, 20 nt, synthetic construct
  source 1..20: mol_type = other RNA
ttgtgtgtgtagtatgtgga

SEQ ID NO: 18267 - RNA, 20 nt, synthetic construct
  source 1..20: mol_type = other RNA
ttgttaggatgattgtccta

SEQ ID NO: 18268 - RNA, 20 nt, synthetic construct
  source 1..20: mol_type = other RNA
ttgttctatgacccaaactg

SEQ ID NO: 18269 - RNA, 20 nt, synthetic construct
  source 1..20: mol_type = other RNA
ttgttctgtggattacagaa

SEQ ID NO: 18270 - RNA, 20 nt, synthetic construct
  source 1..20: mol_type = other RNA
ttgttggacttagctttcag

SEQ ID NO: 18271 - RNA, 20 nt, synthetic construct
  source 1..20: mol_type = other RNA
ttgttgtacttgctcctcta

SEQ ID NO: 18272 - RNA, 20 nt, synthetic construct
  source 1..20: mol_type = other RNA
ttgttgtcattgctgattta

SEQ ID NO: 18273 - RNA, 20 nt, synthetic construct
  source 1..20: mol_type = other RNA
ttgttttctataactcaaga

SEQ ID NO: 18274 - RNA, 20 nt, synthetic construct
  source 1..20: mol_type = other RNA
tttaaaaaagcagttttctt

SEQ ID NO: 18275 - RNA, 20 nt, synthetic construct
  source 1..20: mol_type = other RNA
tttaaaaatggtttgttgga

SEQ ID NO: 18276 - RNA, 20 nt, synthetic construct
  source 1..20: mol_type = other RNA
tttaaaagggcagtttgggt

SEQ ID NO: 18277 - RNA, 20 nt, synthetic construct
  source 1..20: mol_type = other RNA
tttaaagatgtgcctgcctt

SEQ ID NO: 18278 - RNA, 20 nt, synthetic construct
  source 1..20: mol_type = other RNA
tttaaatcagcaatgacaac

SEQ ID NO: 18279 - RNA, 20 nt, synthetic construct
  source 1..20: mol_type = other RNA
tttaaattaccttaactatt

SEQ ID NO: 18280 - RNA, 20 nt, synthetic construct
  source 1..20: mol_type = other RNA
tttaacaccaaatgcttttt

SEQ ID NO: 18281 - RNA, 20 nt, synthetic construct
  source 1..20: mol_type = other RNA
tttaacctgatgctacactt

SEQ ID NO: 18282 - RNA, 20 nt, synthetic construct
  source 1..20: mol_type = other RNA
tttaactatgtagctcctgt

SEQ ID NO: 18283 - RNA, 20 nt, synthetic construct
  source 1..20: mol_type = other RNA
tttaagaacgtgaactaggg

SEQ ID NO: 18284 - RNA, 20 nt, synthetic construct
  source 1..20: mol_type = other RNA
tttaagtaaatggagtgagc

SEQ ID NO: 18285 - RNA, 20 nt, synthetic construct
  source 1..20: mol_type = other RNA
tttaatcctgcagattcaaa

SEQ ID NO: 18286 - RNA, 20 nt, synthetic construct
  source 1..20: mol_type = other RNA
tttaatggaatctcacctcc

SEQ ID NO: 18287 - RNA, 20 nt, synthetic construct
  source 1..20: mol_type = other RNA
tttacagagaattggatctg

SEQ ID NO: 18288 - RNA, 20 nt, synthetic construct
  source 1..20: mol_type = other RNA
tttacagcaagttgtctaac

SEQ ID NO: 18289 - RNA, 20 nt, synthetic construct
  source 1..20: mol_type = other RNA
tttacaggatgaattctgtt

SEQ ID NO: 18290 - RNA, 20 nt, synthetic construct
  source 1..20: mol_type = other RNA
tttacatgtcgctcactcca

SEQ ID NO: 18291 - RNA, 20 nt, synthetic construct
  source 1..20: mol_type = other RNA
tttactgagcagtaaggaaa

SEQ ID NO: 18292 - RNA, 20 nt, synthetic construct
  source 1..20: mol_type = other RNA
tttacttaaagttggctaga

SEQ ID NO: 18293 - RNA, 20 nt, synthetic construct
  source 1..20: mol_type = other RNA
tttagaggaagaaaaaggga

SEQ ID NO: 18294 - RNA, 20 nt, synthetic construct
  source 1..20: mol_type = other RNA
tttagctgaaagctaagtcc

SEQ ID NO: 18295 - RNA, 20 nt, synthetic construct
  source 1..20: mol_type = other RNA
tttagcttttgcttgagaaa

SEQ ID NO: 18296 - RNA, 20 nt, synthetic construct
  source 1..20: mol_type = other RNA
tttaggacaatcatcctaac

SEQ ID NO: 18297 - RNA, 20 nt, synthetic construct
  source 1..20: mol_type = other RNA
tttaggctgggttcatttgt

SEQ ID NO: 18298 - RNA, 20 nt, synthetic construct
  source 1..20: mol_type = other RNA
tttagggaggtgagattcca

SEQ ID NO: 18299 - RNA, 20 nt, synthetic construct
  source 1..20: mol_type = other RNA
tttagtcataccagccactt

SEQ ID NO: 18300 - RNA, 20 nt, synthetic construct
  source 1..20: mol_type = other RNA
tttagtgttatcttttgatc

SEQ ID NO: 18301 - RNA, 20 nt, synthetic construct
  source 1..20: mol_type = other RNA
tttataccatttgagaccct

SEQ ID NO: 18302 - RNA, 20 nt, synthetic construct
  source 1..20: mol_type = other RNA
tttatatgtggcccaagaca

SEQ ID NO: 18303 - RNA, 20 nt, synthetic construct
  source 1..20: mol_type = other RNA
tttatcctgaggaattataa

SEQ ID NO: 18304 - RNA, 20 nt, synthetic construct
  source 1..20: mol_type = other RNA
tttatcctttttccttagct

SEQ ID NO: 18305 - RNA, 20 nt, synthetic construct
  source 1..20: mol_type = other RNA
tttatctaatttgaattgca

SEQ ID NO: 18306 - RNA, 20 nt, synthetic construct
  source 1..20: mol_type = other RNA
tttatgtctgtctctagaaa

SEQ ID NO: 18307 - RNA, 20 nt, synthetic construct
  source 1..20: mol_type = other RNA
tttattaatcttgagcattg

SEQ ID NO: 18308 - RNA, 20 nt, synthetic construct
  source 1..20: mol_type = other RNA
tttattcctccctagttcac

SEQ ID NO: 18309 - RNA, 20 nt, synthetic construct
  source 1..20: mol_type = other RNA
tttatttccttactgctcag

SEQ ID NO: 18310 - RNA, 20 nt, synthetic construct
  source 1..20: mol_type = other RNA
tttcacctgtcattttcatg

SEQ ID NO: 18311 - RNA, 20 nt, synthetic construct
  source 1..20: mol_type = other RNA
tttcactattttccacatac

SEQ ID NO: 18312 - RNA, 20 nt, synthetic construct
  source 1..20: mol_type = other RNA
tttcactgttgtccaaggca

SEQ ID NO: 18313 - RNA, 20 nt, synthetic construct
  source 1..20: mol_type = other RNA
tttcacttcctggaaacact

SEQ ID NO: 18314 - RNA, 20 nt, synthetic construct
  source 1..20: mol_type = other RNA
tttcatgctctatcttcctt

SEQ ID NO: 18315 - RNA, 20 nt, synthetic construct
  source 1..20: mol_type = other RNA
tttcattttatcctttttcc

SEQ ID NO: 18316 - RNA, 20 nt, synthetic construct
  source 1..20: mol_type = other RNA
tttcatttttcactattttc

SEQ ID NO: 18317 - RNA, 20 nt, synthetic construct
  source 1..20: mol_type = other RNA
tttccaatgctcaagattaa

SEQ ID NO: 18318 - RNA, 20 nt, synthetic construct
  source 1..20: mol_type = other RNA
tttccacatactacacacac

SEQ ID NO: 18319 - RNA, 20 nt, synthetic construct
  source 1..20: mol_type = other RNA
tttccaggaagtgaaaactt

SEQ ID NO: 18320 - RNA, 20 nt, synthetic construct
  source 1..20: mol_type = other RNA
tttccatttgttgtacttgc

SEQ ID NO: 18321 - RNA, 20 nt, synthetic construct
  source 1..20: mol_type = other RNA
tttcctcaatttaacagctt

SEQ ID NO: 18322 - RNA, 20 nt, synthetic construct
  source 1..20: mol_type = other RNA
tttccttactgctcagtaaa

SEQ ID NO: 18323 - RNA, 20 nt, synthetic construct
  source 1..20: mol_type = other RNA
tttccttagctgggattctg

SEQ ID NO: 18324 - RNA, 20 nt, synthetic construct
  source 1..20: mol_type = other RNA
tttcgcgagacaccaggcta

SEQ ID NO: 18325 - RNA, 20 nt, synthetic construct
  source 1..20: mol_type = other RNA
tttcggcttccctgggccac

SEQ ID NO: 18326 - RNA, 20 nt, synthetic construct
  source 1..20: mol_type = other RNA
tttctagagacagacataaa

SEQ ID NO: 18327 - RNA, 20 nt, synthetic construct
  source 1..20: mol_type = other RNA
tttctataactcaagatatg

SEQ ID NO: 18328 - RNA, 20 nt, synthetic construct
  source 1..20: mol_type = other RNA
tttctattaagatttaacct

SEQ ID NO: 18329 - RNA, 20 nt, synthetic construct
  source 1..20: mol_type = other RNA
tttctcaagcaaaagctaaa

SEQ ID NO: 18330 - RNA, 20 nt, synthetic construct
  source 1..20: mol_type = other RNA
tttctccctctcttgatctt

SEQ ID NO: 18331 - RNA, 20 nt, synthetic construct
  source 1..20: mol_type = other RNA
tttctctttttactgagcag

SEQ ID NO: 18332 - RNA, 20 nt, synthetic construct
  source 1..20: mol_type = other RNA
tttctgtcctacaagttttc

SEQ ID NO: 18333 - RNA, 20 nt, synthetic construct
  source 1..20: mol_type = other RNA
tttctgttcttaccagttag

SEQ ID NO: 18334 - RNA, 20 nt, synthetic construct
  source 1..20: mol_type = other RNA
tttcttcctctaaatacctc

SEQ ID NO: 18335 - RNA, 20 nt, synthetic construct
  source 1..20: mol_type = other RNA
tttcttctgactcctgagca

SEQ ID NO: 18336 - RNA, 20 nt, synthetic construct
  source 1..20: mol_type = other RNA
tttgaaatccaaactcatta

SEQ ID NO: 18337 - RNA, 20 nt, synthetic construct
  source 1..20: mol_type = other RNA
tttgaaggaatagtgtcttg

SEQ ID NO: 18338 - RNA, 20 nt, synthetic construct
  source 1..20: mol_type = other RNA
tttgaatctgcaggattaaa

SEQ ID NO: 18339 - RNA, 20 nt, synthetic construct
  source 1..20: mol_type = other RNA
tttgaattgcaactgtggac

SEQ ID NO: 18340 - RNA, 20 nt, synthetic construct
  source 1..20: mol_type = other RNA
tttgacattttattaatctt

SEQ ID NO: 18341 - RNA, 20 nt, synthetic construct
  source 1..20: mol_type = other RNA
tttgagacccttgctgcacc

SEQ ID NO: 18342 - RNA, 20 nt, synthetic construct
  source 1..20: mol_type = other RNA
tttgatccatcttacatctt

SEQ ID NO: 18343 - RNA, 20 nt, synthetic construct
  source 1..20: mol_type = other RNA
tttgcatccctaccaggcat

SEQ ID NO: 18344 - RNA, 20 nt, synthetic construct
  source 1..20: mol_type = other RNA
tttgctcatcagctgtcctt

SEQ ID NO: 18345 - RNA, 20 nt, synthetic construct
  source 1..20: mol_type = other RNA
tttgcttgagaaaccagtgc

SEQ ID NO: 18346 - RNA, 20 nt, synthetic construct
  source 1..20: mol_type = other RNA
tttggaagctatcacacagg

SEQ ID NO: 18347 - RNA, 20 nt, synthetic construct
  source 1..20: mol_type = other RNA
tttggaatgctacccttgct

SEQ ID NO: 18348 - RNA, 20 nt, synthetic construct
  source 1..20: mol_type = other RNA
tttggagcatttttctagag

SEQ ID NO: 18349 - RNA, 20 nt, synthetic construct
  source 1..20: mol_type = other RNA
tttgggtaactgcaattcat

SEQ ID NO: 18350 - RNA, 20 nt, synthetic construct
  source 1..20: mol_type = other RNA
tttgggtcatagaacaacag

SEQ ID NO: 18351 - RNA, 20 nt, synthetic construct
  source 1..20: mol_type = other RNA
tttggtcatgccttccatgg

SEQ ID NO: 18352 - RNA, 20 nt, synthetic construct
  source 1..20: mol_type = other RNA
tttggtggtgcagcaagggt

SEQ ID NO: 18353 - RNA, 20 nt, synthetic construct
  source 1..20: mol_type = other RNA
tttgtactgcgtgggtcata

SEQ ID NO: 18354 - RNA, 20 nt, synthetic construct
  source 1..20: mol_type = other RNA
tttgtatcacacagacctat

SEQ ID NO: 18355 - RNA, 20 nt, synthetic construct
  source 1..20: mol_type = other RNA
tttgtgattgttttctataa

SEQ ID NO: 18356 - RNA, 20 nt, synthetic construct
  source 1..20: mol_type = other RNA
tttgtggggtggttcttttt

SEQ ID NO: 18357 - RNA, 20 nt, synthetic construct
  source 1..20: mol_type = other RNA
tttgtggtggaaccaatctg

SEQ ID NO: 18358 - RNA, 20 nt, synthetic construct
  source 1..20: mol_type = other RNA
tttgtgtgtgtagtatgtgg

SEQ ID NO: 18359 - RNA, 20 nt, synthetic construct
  source 1..20: mol_type = other RNA
tttgttggacttagctttca

SEQ ID NO: 18360 - RNA, 20 nt, synthetic construct
  source 1..20: mol_type = other RNA
tttgttgtacttgctcctct

SEQ ID NO: 18361 - RNA, 20 nt, synthetic construct
  source 1..20: mol_type = other RNA
ttttaaaaaagcagttttct

SEQ ID NO: 18362 - RNA, 20 nt, synthetic construct
  source 1..20: mol_type = other RNA
ttttaaaagggcagtttggg

SEQ ID NO: 18363 - RNA, 20 nt, synthetic construct
  source 1..20: mol_type = other RNA
ttttaaagatgtgcctgcct

SEQ ID NO: 18364 - RNA, 20 nt, synthetic construct
  source 1..20: mol_type = other RNA
ttttaacaccaaatgctttt

SEQ ID NO: 18365 - RNA, 20 nt, synthetic construct
  source 1..20: mol_type = other RNA
ttttaatcctgcagattcaa

SEQ ID NO: 18366 - RNA, 20 nt, synthetic construct
  source 1..20: mol_type = other RNA
ttttactgagcagtaaggaa

SEQ ID NO: 18367 - RNA, 20 nt, synthetic construct
  source 1..20: mol_type = other RNA
ttttagcttttgcttgagaa

SEQ ID NO: 18368 - RNA, 20 nt, synthetic construct
  source 1..20: mol_type = other RNA
ttttagggaggtgagattcc

SEQ ID NO: 18369 - RNA, 20 nt, synthetic construct
  source 1..20: mol_type = other RNA
ttttataccatttgagaccc

SEQ ID NO: 18370 - RNA, 20 nt, synthetic construct
  source 1..20: mol_type = other RNA
ttttatcctgaggaattata

SEQ ID NO: 18371 - RNA, 20 nt, synthetic construct
  source 1..20: mol_type = other RNA
ttttatcctttttccttagc

SEQ ID NO: 18372 - RNA, 20 nt, synthetic construct
  source 1..20: mol_type = other RNA
ttttatctaatttgaattgc

SEQ ID NO: 18373 - RNA, 20 nt, synthetic construct
  source 1..20: mol_type = other RNA
ttttattaatcttgagcatt

SEQ ID NO: 18374 - RNA, 20 nt, synthetic construct
  source 1..20: mol_type = other RNA
ttttattcctccctagttca

SEQ ID NO: 18375 - RNA, 20 nt, synthetic construct
  source 1..20: mol_type = other RNA
ttttatttccttactgctca

SEQ ID NO: 18376 - RNA, 20 nt, synthetic construct
  source 1..20: mol_type = other RNA
ttttcactattttccacata

SEQ ID NO: 18377 - RNA, 20 nt, synthetic construct
  source 1..20: mol_type = other RNA
ttttcacttcctggaaacac

SEQ ID NO: 18378 - RNA, 20 nt, synthetic construct
  source 1..20: mol_type = other RNA
ttttcatgctctatcttcct

SEQ ID NO: 18379 - RNA, 20 nt, synthetic construct
  source 1..20: mol_type = other RNA
ttttcattttatcctttttc

SEQ ID NO: 18380 - RNA, 20 nt, synthetic construct
  source 1..20: mol_type = other RNA
ttttcatttttcactatttt

SEQ ID NO: 18381 - RNA, 20 nt, synthetic construct
  source 1..20: mol_type = other RNA
ttttccaatgctcaagatta

SEQ ID NO: 18382 - RNA, 20 nt, synthetic construct
  source 1..20: mol_type = other RNA
ttttccacatactacacaca

SEQ ID NO: 18383 - RNA, 20 nt, synthetic construct
  source 1..20: mol_type = other RNA
ttttccatttgttgtacttg

SEQ ID NO: 18384 - RNA, 20 nt, synthetic construct
  source 1..20: mol_type = other RNA
ttttccttagctgggattct

SEQ ID NO: 18385 - RNA, 20 nt, synthetic construct
  source 1..20: mol_type = other RNA
ttttctagagacagacataa

SEQ ID NO: 18386 - RNA, 20 nt, synthetic construct
  source 1..20: mol_type = other RNA
ttttctataactcaagatat

SEQ ID NO: 18387 - RNA, 20 nt, synthetic construct
  source 1..20: mol_type = other RNA
ttttctattaagatttaacc

SEQ ID NO: 18388 - RNA, 20 nt, synthetic construct
  source 1..20: mol_type = other RNA
ttttctctttttactgagca

SEQ ID NO: 18389 - RNA, 20 nt, synthetic construct
  source 1..20: mol_type = other RNA
ttttcttcctctaaatacct

SEQ ID NO: 18390 - RNA, 20 nt, synthetic construct
  source 1..20: mol_type = other RNA
ttttcttctgactcctgagc

SEQ ID NO: 18391 - RNA, 20 nt, synthetic construct
  source 1..20: mol_type = other RNA
ttttgaaatccaaactcatt

SEQ ID NO: 18392 - RNA, 20 nt, synthetic construct
  source 1..20: mol_type = other RNA
ttttgaaggaatagtgtctt

SEQ ID NO: 18393 - RNA, 20 nt, synthetic construct
  source 1..20: mol_type = other RNA
ttttgatccatcttacatct

SEQ ID NO: 18394 - RNA, 20 nt, synthetic construct
  source 1..20: mol_type = other RNA
ttttgctcatcagctgtcct

SEQ ID NO: 18395 - RNA, 20 nt, synthetic construct
  source 1..20: mol_type = other RNA
ttttgcttgagaaaccagtg

SEQ ID NO: 18396 - RNA, 20 nt, synthetic construct
  source 1..20: mol_type = other RNA
ttttggaatgctacccttgc

SEQ ID NO: 18397 - RNA, 20 nt, synthetic construct
  source 1..20: mol_type = other RNA
ttttggagcatttttctaga

SEQ ID NO: 18398 - RNA, 20 nt, synthetic construct
  source 1..20: mol_type = other RNA
tttttaaaagggcagtttgg

SEQ ID NO: 18399 - RNA, 20 nt, synthetic construct
  source 1..20: mol_type = other RNA
tttttaaagatgtgcctgcc

SEQ ID NO: 18400 - RNA, 20 nt, synthetic construct
  source 1..20: mol_type = other RNA
tttttactgagcagtaagga

SEQ ID NO: 18401 - RNA, 20 nt, synthetic construct
  source 1..20: mol_type = other RNA
tttttatctaatttgaattg

SEQ ID NO: 18402 - RNA, 20 nt, synthetic construct
  source 1..20: mol_type = other RNA
tttttcactattttccacat

SEQ ID NO: 18403 - RNA, 20 nt, synthetic construct
  source 1..20: mol_type = other RNA
tttttccttagctgggattc

SEQ ID NO: 18404 - RNA, 20 nt, synthetic construct
  source 1..20: mol_type = other RNA
tttttctagagacagacata

SEQ ID NO: 18405 - RNA, 20 nt, synthetic construct
  source 1..20: mol_type = other RNA
tttttctattaagatttaac

SEQ ID NO: 18406 - RNA, 20 nt, synthetic construct
  source 1..20: mol_type = other RNA
tttttcttcctctaaatacc

SEQ ID NO: 18407 - RNA, 20 nt, synthetic construct
  source 1..20: mol_type = other RNA
tttttgaaatccaaactcat

SEQ ID NO: 18408 - RNA, 20 nt, synthetic construct
  source 1..20: mol_type = other RNA
tttttgaaggaatagtgtct

SEQ ID NO: 18409 - RNA, 20 nt, synthetic construct
  source 1..20: mol_type = other RNA
tttttgctcatcagctgtcc

SEQ ID NO: 18410 - RNA, 20 nt, synthetic construct
  source 1..20: mol_type = other RNA
tttttggaatgctacccttg

SEQ ID NO: 18411 - RNA, 20 nt, synthetic construct
  source 1..20: mol_type = other RNA
tttttggagcatttttctag

SEQ ID NO: 18412 - RNA, 20 nt, synthetic construct
  source 1..20: mol_type = other RNA
ttttttaaaagggcagtttg

SEQ ID NO: 18413 - RNA, 20 nt, synthetic construct
  source 1..20: mol_type = other RNA
ttttttgaaatccaaactca

SEQ ID NO: 18414 - RNA, 20 nt, synthetic construct
  source 1..20: mol_type = other RNA
ttttttgctcatcagctgtc

SEQ ID NO: 18415 - RNA, 21 nt, synthetic construct
  source 1..21: mol_type = other RNA
aaaaaagcagttttcttctga

SEQ ID NO: 18416 - RNA, 21 nt, synthetic construct
  source 1..21: mol_type = other RNA
aaaaaatgcataatgaatttt

SEQ ID NO: 18417 - RNA, 21 nt, synthetic construct
  source 1..21: mol_type = other RNA
aaaaagaaccaccccacaaag

SEQ ID NO: 18418 - RNA, 21 nt, synthetic construct
  source 1..21: mol_type = other RNA
aaaaagagaaaaccatcaatg

SEQ ID NO: 18419 - RNA, 21 nt, synthetic construct
  source 1..21: mol_type = other RNA
aaaaagcagttttcttctgac

SEQ ID NO: 18420 - RNA, 21 nt, synthetic construct
  source 1..21: mol_type = other RNA
aaaaagcatttggtgttaaaa

SEQ ID NO: 18421 - RNA, 21 nt, synthetic construct
  source 1..21: mol_type = other RNA
aaaaagctgttaaattgagga

SEQ ID NO: 18422 - RNA, 21 nt, synthetic construct
  source 1..21: mol_type = other RNA
aaaaagggagatgttgcctaa

SEQ ID NO: 18423 - RNA, 21 nt, synthetic construct
  source 1..21: mol_type = other RNA
aaaaatgataagtagtgataa

SEQ ID NO: 18424 - RNA, 21 nt, synthetic construct
  source 1..21: mol_type = other RNA
aaaaatgcataatgaatttta

SEQ ID NO: 18425 - RNA, 21 nt, synthetic construct
  source 1..21: mol_type = other RNA
aaaaatgctccaaaaatgata

SEQ ID NO: 18426 - RNA, 21 nt, synthetic construct
  source 1..21: mol_type = other RNA
aaaaatggtttgttggactta

SEQ ID NO: 18427 - RNA, 21 nt, synthetic construct
  source 1..21: mol_type = other RNA
aaaaattcagttctttagtca

SEQ ID NO: 18428 - RNA, 21 nt, synthetic construct
  source 1..21: mol_type = other RNA
aaaaattttagcttttgcttg

SEQ ID NO: 18429 - RNA, 21 nt, synthetic construct
  source 1..21: mol_type = other RNA
aaaacaagcagttaaatgaaa

SEQ ID NO: 18430 - RNA, 21 nt, synthetic construct
  source 1..21: mol_type = other RNA
aaaacaatcacaaagtaagtt

SEQ ID NO: 18431 - RNA, 21 nt, synthetic construct
  source 1..21: mol_type = other RNA
aaaaccatcaatgtccacgta

SEQ ID NO: 18432 - RNA, 21 nt, synthetic construct
  source 1..21: mol_type = other RNA
aaaactcaggtgatcatgctt

SEQ ID NO: 18433 - RNA, 21 nt, synthetic construct
  source 1..21: mol_type = other RNA
aaaactgcttttttaaaaggg

SEQ ID NO: 18434 - RNA, 21 nt, synthetic construct
  source 1..21: mol_type = other RNA
aaaacttgtaggacagaaatt

SEQ ID NO: 18435 - RNA, 21 nt, synthetic construct
  source 1..21: mol_type = other RNA
aaaagaaccaccccacaaaga

SEQ ID NO: 18436 - RNA, 21 nt, synthetic construct
  source 1..21: mol_type = other RNA
aaaagagaaaaccatcaatgt

SEQ ID NO: 18437 - RNA, 21 nt, synthetic construct
  source 1..21: mol_type = other RNA
aaaagataacactaaagacag

SEQ ID NO: 18438 - RNA, 21 nt, synthetic construct
  source 1..21: mol_type = other RNA
aaaagcactgctgggtaagag

SEQ ID NO: 18439 - RNA, 21 nt, synthetic construct
  source 1..21: mol_type = other RNA
aaaagcagcaagggtagcatt

SEQ ID NO: 18440 - RNA, 21 nt, synthetic construct
  source 1..21: mol_type = other RNA
aaaagcagttttcttctgact

SEQ ID NO: 18441 - RNA, 21 nt, synthetic construct
  source 1..21: mol_type = other RNA
aaaagcatttggtgttaaaat

SEQ ID NO: 18442 - RNA, 21 nt, synthetic construct
  source 1..21: mol_type = other RNA
aaaagctgaagctctctggcc

SEQ ID NO: 18443 - RNA, 21 nt, synthetic construct
  source 1..21: mol_type = other RNA
aaaagctgttaaattgaggaa

SEQ ID NO: 18444 - RNA, 21 nt, synthetic construct
  source 1..21: mol_type = other RNA
aaaagggagatgttgcctaac

SEQ ID NO: 18445 - RNA, 21 nt, synthetic construct
  source 1..21: mol_type = other RNA
aaaagggcagtttgggtcata

SEQ ID NO: 18446 - RNA, 21 nt, synthetic construct
  source 1..21: mol_type = other RNA
aaaagtggctggtatgactaa

SEQ ID NO: 18447 - RNA, 21 nt, synthetic construct
  source 1..21: mol_type = other RNA
aaaatgacaggtgaaactcca

SEQ ID NO: 18448 - RNA, 21 nt, synthetic construct
  source 1..21: mol_type = other RNA
aaaatgataagtagtgataat

SEQ ID NO: 18449 - RNA, 21 nt, synthetic construct
  source 1..21: mol_type = other RNA
aaaatgcataatgaattttag

SEQ ID NO: 18450 - RNA, 21 nt, synthetic construct
  source 1..21: mol_type = other RNA
aaaatgctccaaaaatgataa

SEQ ID NO: 18451 - RNA, 21 nt, synthetic construct
  source 1..21: mol_type = other RNA
aaaatgggatcaagtatgagt

SEQ ID NO: 18452 - RNA, 21 nt, synthetic construct
  source 1..21: mol_type = other RNA
aaaatggtttgttggacttag

SEQ ID NO: 18453 - RNA, 21 nt, synthetic construct
  source 1..21: mol_type = other RNA
aaaatgttggtattataattc

SEQ ID NO: 18454 - RNA, 21 nt, synthetic construct
  source 1..21: mol_type = other RNA
aaaattcagttctttagtcat

SEQ ID NO: 18455 - RNA, 21 nt, synthetic construct
  source 1..21: mol_type = other RNA
aaaattttagcttttgcttga

SEQ ID NO: 18456 - RNA, 21 nt, synthetic construct
  source 1..21: mol_type = other RNA
aaacaagcagttaaatgaaat

SEQ ID NO: 18457 - RNA, 21 nt, synthetic construct
  source 1..21: mol_type = other RNA
aaacaatcacaaagtaagttt

SEQ ID NO: 18458 - RNA, 21 nt, synthetic construct
  source 1..21: mol_type = other RNA
aaacacttgattggaggagct

SEQ ID NO: 18459 - RNA, 21 nt, synthetic construct
  source 1..21: mol_type = other RNA
aaacagtacaagccagtaatg

SEQ ID NO: 18460 - RNA, 21 nt, synthetic construct
  source 1..21: mol_type = other RNA
aaacatttaagaacgtgaact

SEQ ID NO: 18461 - RNA, 21 nt, synthetic construct
  source 1..21: mol_type = other RNA
aaaccagacagattggttcca

SEQ ID NO: 18462 - RNA, 21 nt, synthetic construct
  source 1..21: mol_type = other RNA
aaaccaggggtgtccaatctt

SEQ ID NO: 18463 - RNA, 21 nt, synthetic construct
  source 1..21: mol_type = other RNA
aaaccagtgcttccctccctc

SEQ ID NO: 18464 - RNA, 21 nt, synthetic construct
  source 1..21: mol_type = other RNA
aaaccataaagacatttacat

SEQ ID NO: 18465 - RNA, 21 nt, synthetic construct
  source 1..21: mol_type = other RNA
aaaccatcaatgtccacgtat

SEQ ID NO: 18466 - RNA, 21 nt, synthetic construct
  source 1..21: mol_type = other RNA
aaaccatttttaaagatgtgc

SEQ ID NO: 18467 - RNA, 21 nt, synthetic construct
  source 1..21: mol_type = other RNA
aaactcaggtgatcatgcttt

SEQ ID NO: 18468 - RNA, 21 nt, synthetic construct
  source 1..21: mol_type = other RNA
aaactcattaacgcttgcttt

SEQ ID NO: 18469 - RNA, 21 nt, synthetic construct
  source 1..21: mol_type = other RNA
aaactccattactggcttgta

SEQ ID NO: 18470 - RNA, 21 nt, synthetic construct
  source 1..21: mol_type = other RNA
aaactcctaaaactttaagaa

SEQ ID NO: 18471 - RNA, 21 nt, synthetic construct
  source 1..21: mol_type = other RNA
aaactgcccttttaaaaaagc

SEQ ID NO: 18472 - RNA, 21 nt, synthetic construct
  source 1..21: mol_type = other RNA
aaactgctcaggagtcagaag

SEQ ID NO: 18473 - RNA, 21 nt, synthetic construct
  source 1..21: mol_type = other RNA
aaactgcttttttaaaagggc

SEQ ID NO: 18474 - RNA, 21 nt, synthetic construct
  source 1..21: mol_type = other RNA
aaactgttacaggagctacat

SEQ ID NO: 18475 - RNA, 21 nt, synthetic construct
  source 1..21: mol_type = other RNA
aaacttgtaggacagaaattt

SEQ ID NO: 18476 - RNA, 21 nt, synthetic construct
  source 1..21: mol_type = other RNA
aaagaaccaccccacaaagat

SEQ ID NO: 18477 - RNA, 21 nt, synthetic construct
  source 1..21: mol_type = other RNA
aaagacagagacagcaatttg

SEQ ID NO: 18478 - RNA, 21 nt, synthetic construct
  source 1..21: mol_type = other RNA
aaagacatttacatgtcgctc

SEQ ID NO: 18479 - RNA, 21 nt, synthetic construct
  source 1..21: mol_type = other RNA
aaagagaaaaccatcaatgtc

SEQ ID NO: 18480 - RNA, 21 nt, synthetic construct
  source 1..21: mol_type = other RNA
aaagataacactaaagacaga

SEQ ID NO: 18481 - RNA, 21 nt, synthetic construct
  source 1..21: mol_type = other RNA
aaagatatatgacgtctctat

SEQ ID NO: 18482 - RNA, 21 nt, synthetic construct
  source 1..21: mol_type = other RNA
aaagatgtgcctgccttggac

SEQ ID NO: 18483 - RNA, 21 nt, synthetic construct
  source 1..21: mol_type = other RNA
aaagattggacacccctggtt

SEQ ID NO: 18484 - RNA, 21 nt, synthetic construct
  source 1..21: mol_type = other RNA
aaagcaagcgttaatgagttt

SEQ ID NO: 18485 - RNA, 21 nt, synthetic construct
  source 1..21: mol_type = other RNA
aaagcactgctgggtaagagt

SEQ ID NO: 18486 - RNA, 21 nt, synthetic construct
  source 1..21: mol_type = other RNA
aaagcagcaagggtagcattc

SEQ ID NO: 18487 - RNA, 21 nt, synthetic construct
  source 1..21: mol_type = other RNA
aaagcagtagtcaagatcacc

SEQ ID NO: 18488 - RNA, 21 nt, synthetic construct
  source 1..21: mol_type = other RNA
aaagcagttttcttctgactc

SEQ ID NO: 18489 - RNA, 21 nt, synthetic construct
  source 1..21: mol_type = other RNA
aaagcatgatcacctgagttt

SEQ ID NO: 18490 - RNA, 21 nt, synthetic construct
  source 1..21: mol_type = other RNA
aaagcatttggtgttaaaatg

SEQ ID NO: 18491 - RNA, 21 nt, synthetic construct
  source 1..21: mol_type = other RNA
aaagctaagtccaacaaacca

SEQ ID NO: 18492 - RNA, 21 nt, synthetic construct
  source 1..21: mol_type = other RNA
aaagctagtgctatgtctgaa

SEQ ID NO: 18493 - RNA, 21 nt, synthetic construct
  source 1..21: mol_type = other RNA
aaagctgaagctctctggccc

SEQ ID NO: 18494 - RNA, 21 nt, synthetic construct
  source 1..21: mol_type = other RNA
aaagctgtcctgggtcccatg

SEQ ID NO: 18495 - RNA, 21 nt, synthetic construct
  source 1..21: mol_type = other RNA
aaagctgttaaattgaggaaa

SEQ ID NO: 18496 - RNA, 21 nt, synthetic construct
  source 1..21: mol_type = other RNA
aaaggaagatagagcatgaaa

SEQ ID NO: 18497 - RNA, 21 nt, synthetic construct
  source 1..21: mol_type = other RNA
aaagggagatgttgcctaacc

SEQ ID NO: 18498 - RNA, 21 nt, synthetic construct
  source 1..21: mol_type = other RNA
aaagggcagtttgggtcatag

SEQ ID NO: 18499 - RNA, 21 nt, synthetic construct
  source 1..21: mol_type = other RNA
aaaggggagatgacatttgaa

SEQ ID NO: 18500 - RNA, 21 nt, synthetic construct
  source 1..21: mol_type = other RNA
aaaggggtagagagcctgggg

SEQ ID NO: 18501 - RNA, 21 nt, synthetic construct
  source 1..21: mol_type = other RNA
aaagtctatccagggacctta

SEQ ID NO: 18502 - RNA, 21 nt, synthetic construct
  source 1..21: mol_type = other RNA
aaagtggctggtatgactaaa

SEQ ID NO: 18503 - RNA, 21 nt, synthetic construct
  source 1..21: mol_type = other RNA
aaagtgtagcatcaggttaaa

SEQ ID NO: 18504 - RNA, 21 nt, synthetic construct
  source 1..21: mol_type = other RNA
aaagttggctagacatcagag

SEQ ID NO: 18505 - RNA, 21 nt, synthetic construct
  source 1..21: mol_type = other RNA
aaataaaagctgaagctctct

SEQ ID NO: 18506 - RNA, 21 nt, synthetic construct
  source 1..21: mol_type = other RNA
aaatacctctcatttctgttc

SEQ ID NO: 18507 - RNA, 21 nt, synthetic construct
  source 1..21: mol_type = other RNA
aaatatgacctctctcctgaa

SEQ ID NO: 18508 - RNA, 21 nt, synthetic construct
  source 1..21: mol_type = other RNA
aaatcagcaatgacaacaacc

SEQ ID NO: 18509 - RNA, 21 nt, synthetic construct
  source 1..21: mol_type = other RNA
aaatcatagagacgtcatata

SEQ ID NO: 18510 - RNA, 21 nt, synthetic construct
  source 1..21: mol_type = other RNA
aaatccaaactcattaacgct

SEQ ID NO: 18511 - RNA, 21 nt, synthetic construct
  source 1..21: mol_type = other RNA
aaatgaaaaagctgttaaatt

SEQ ID NO: 18512 - RNA, 21 nt, synthetic construct
  source 1..21: mol_type = other RNA
aaatgaaatgtaatgggccag

SEQ ID NO: 18513 - RNA, 21 nt, synthetic construct
  source 1..21: mol_type = other RNA
aaatgaacccagcctaaattt

SEQ ID NO: 18514 - RNA, 21 nt, synthetic construct
  source 1..21: mol_type = other RNA
aaatgacaggtgaaactccat

SEQ ID NO: 18515 - RNA, 21 nt, synthetic construct
  source 1..21: mol_type = other RNA
aaatgagaggtatttagagga

SEQ ID NO: 18516 - RNA, 21 nt, synthetic construct
  source 1..21: mol_type = other RNA
aaatgataagtagtgataatc

SEQ ID NO: 18517 - RNA, 21 nt, synthetic construct
  source 1..21: mol_type = other RNA
aaatgcataatgaattttagg

SEQ ID NO: 18518 - RNA, 21 nt, synthetic construct
  source 1..21: mol_type = other RNA
aaatgctccaaaaatgataag

SEQ ID NO: 18519 - RNA, 21 nt, synthetic construct
  source 1..21: mol_type = other RNA
aaatggaaaatgggatcaagt

SEQ ID NO: 18520 - RNA, 21 nt, synthetic construct
  source 1..21: mol_type = other RNA
aaatggagtgagcgacatgta

SEQ ID NO: 18521 - RNA, 21 nt, synthetic construct
  source 1..21: mol_type = other RNA
aaatgggatcaagtatgagtg

SEQ ID NO: 18522 - RNA, 21 nt, synthetic construct
  source 1..21: mol_type = other RNA
aaatggtataaaactcaggtg

SEQ ID NO: 18523 - RNA, 21 nt, synthetic construct
  source 1..21: mol_type = other RNA
aaatggtttgttggacttagc

SEQ ID NO: 18524 - RNA, 21 nt, synthetic construct
  source 1..21: mol_type = other RNA
aaatgtaatgggccagagagc

SEQ ID NO: 18525 - RNA, 21 nt, synthetic construct
  source 1..21: mol_type = other RNA
aaatgtcaaaccataaagaca

SEQ ID NO: 18526 - RNA, 21 nt, synthetic construct
  source 1..21: mol_type = other RNA
aaatgtcatctcccctttggt

SEQ ID NO: 18527 - RNA, 21 nt, synthetic construct
  source 1..21: mol_type = other RNA
aaatgttggtattataattcc

SEQ ID NO: 18528 - RNA, 21 nt, synthetic construct
  source 1..21: mol_type = other RNA
aaattaaggcttgagctgggg

SEQ ID NO: 18529 - RNA, 21 nt, synthetic construct
  source 1..21: mol_type = other RNA
aaattaccttaactattctga

SEQ ID NO: 18530 - RNA, 21 nt, synthetic construct
  source 1..21: mol_type = other RNA
aaattcagttctttagtcata

SEQ ID NO: 18531 - RNA, 21 nt, synthetic construct
  source 1..21: mol_type = other RNA
aaattgaggaaagtctatcca

SEQ ID NO: 18532 - RNA, 21 nt, synthetic construct
  source 1..21: mol_type = other RNA
aaattgctgtctctgtcttta

SEQ ID NO: 18533 - RNA, 21 nt, synthetic construct
  source 1..21: mol_type = other RNA
aaatttaggctgggttcattt

SEQ ID NO: 18534 - RNA, 21 nt, synthetic construct
  source 1..21: mol_type = other RNA
aaatttctgtcctacaagttt

SEQ ID NO: 18535 - RNA, 21 nt, synthetic construct
  source 1..21: mol_type = other RNA
aaattttagcttttgcttgag

SEQ ID NO: 18536 - RNA, 21 nt, synthetic construct
  source 1..21: mol_type = other RNA
aacaaaccatttttaaagatg

SEQ ID NO: 18537 - RNA, 21 nt, synthetic construct
  source 1..21: mol_type = other RNA
aacaaatggaaaatgggatca

SEQ ID NO: 18538 - RNA, 21 nt, synthetic construct
  source 1..21: mol_type = other RNA
aacaacagaccatggaaggca

SEQ ID NO: 18539 - RNA, 21 nt, synthetic construct
  source 1..21: mol_type = other RNA
aacaaccccagaattactatg

SEQ ID NO: 18540 - RNA, 21 nt, synthetic construct
  source 1..21: mol_type = other RNA
aacaagatgtaagatggatca

SEQ ID NO: 18541 - RNA, 21 nt, synthetic construct
  source 1..21: mol_type = other RNA
aacaagcagttaaatgaaatg

SEQ ID NO: 18542 - RNA, 21 nt, synthetic construct
  source 1..21: mol_type = other RNA
aacaagtccggggctacagct

SEQ ID NO: 18543 - RNA, 21 nt, synthetic construct
  source 1..21: mol_type = other RNA
aacaatcacaaagtaagtttt

SEQ ID NO: 18544 - RNA, 21 nt, synthetic construct
  source 1..21: mol_type = other RNA
aacactaaagacagagacagc

SEQ ID NO: 18545 - RNA, 21 nt, synthetic construct
  source 1..21: mol_type = other RNA
aacacttgattggaggagctc

SEQ ID NO: 18546 - RNA, 21 nt, synthetic construct
  source 1..21: mol_type = other RNA
aacagaaatgagaggtattta

SEQ ID NO: 18547 - RNA, 21 nt, synthetic construct
  source 1..21: mol_type = other RNA
aacagaattcatcctgtaaac

SEQ ID NO: 18548 - RNA, 21 nt, synthetic construct
  source 1..21: mol_type = other RNA
aacagaccatggaaggcatga

SEQ ID NO: 18549 - RNA, 21 nt, synthetic construct
  source 1..21: mol_type = other RNA
aacagctttttcatttttcac

SEQ ID NO: 18550 - RNA, 21 nt, synthetic construct
  source 1..21: mol_type = other RNA
aacagtacaagccagtaatgg

SEQ ID NO: 18551 - RNA, 21 nt, synthetic construct
  source 1..21: mol_type = other RNA
aacagtgaaagcaagcgttaa

SEQ ID NO: 18552 - RNA, 21 nt, synthetic construct
  source 1..21: mol_type = other RNA
aacagtttaatggaatctcac

SEQ ID NO: 18553 - RNA, 21 nt, synthetic construct
  source 1..21: mol_type = other RNA
aacatctccctttttcttcct

SEQ ID NO: 18554 - RNA, 21 nt, synthetic construct
  source 1..21: mol_type = other RNA
aacatttaagaacgtgaacta

SEQ ID NO: 18555 - RNA, 21 nt, synthetic construct
  source 1..21: mol_type = other RNA
aaccaatctgtctggtttcgc

SEQ ID NO: 18556 - RNA, 21 nt, synthetic construct
  source 1..21: mol_type = other RNA
aaccaccccacaaagatatat

SEQ ID NO: 18557 - RNA, 21 nt, synthetic construct
  source 1..21: mol_type = other RNA
aaccagacagattggttccac

SEQ ID NO: 18558 - RNA, 21 nt, synthetic construct
  source 1..21: mol_type = other RNA
aaccaggggtgtccaatcttt

SEQ ID NO: 18559 - RNA, 21 nt, synthetic construct
  source 1..21: mol_type = other RNA
aaccagtgcttccctccctca

SEQ ID NO: 18560 - RNA, 21 nt, synthetic construct
  source 1..21: mol_type = other RNA
aaccataaagacatttacatg

SEQ ID NO: 18561 - RNA, 21 nt, synthetic construct
  source 1..21: mol_type = other RNA
aaccatcaatgtccacgtatt

SEQ ID NO: 18562 - RNA, 21 nt, synthetic construct
  source 1..21: mol_type = other RNA
aaccatttttaaagatgtgcc

SEQ ID NO: 18563 - RNA, 21 nt, synthetic construct
  source 1..21: mol_type = other RNA
aacccagcctaaatttctgtc

SEQ ID NO: 18564 - RNA, 21 nt, synthetic construct
  source 1..21: mol_type = other RNA
aaccccagaattactatgacc

SEQ ID NO: 18565 - RNA, 21 nt, synthetic construct
  source 1..21: mol_type = other RNA
aacccgcgggccgcatgggac

SEQ ID NO: 18566 - RNA, 21 nt, synthetic construct
  source 1..21: mol_type = other RNA
aacctcagatccaattctctg

SEQ ID NO: 18567 - RNA, 21 nt, synthetic construct
  source 1..21: mol_type = other RNA
aacctgatgctacactttggt

SEQ ID NO: 18568 - RNA, 21 nt, synthetic construct
  source 1..21: mol_type = other RNA
aacgagactgcggattatcac

SEQ ID NO: 18569 - RNA, 21 nt, synthetic construct
  source 1..21: mol_type = other RNA
aacgcttgctttcactgttgt

SEQ ID NO: 18570 - RNA, 21 nt, synthetic construct
  source 1..21: mol_type = other RNA
aacgtgaactagggaggaata

SEQ ID NO: 18571 - RNA, 21 nt, synthetic construct
  source 1..21: mol_type = other RNA
aactagggaggaataaaagca

SEQ ID NO: 18572 - RNA, 21 nt, synthetic construct
  source 1..21: mol_type = other RNA
aactatgtagctcctgtaaca

SEQ ID NO: 18573 - RNA, 21 nt, synthetic construct
  source 1..21: mol_type = other RNA
aactattctgagctttttgaa

SEQ ID NO: 18574 - RNA, 21 nt, synthetic construct
  source 1..21: mol_type = other RNA
aactcaagatatgatgcttag

SEQ ID NO: 18575 - RNA, 21 nt, synthetic construct
  source 1..21: mol_type = other RNA
aactcaggtgatcatgcttta

SEQ ID NO: 18576 - RNA, 21 nt, synthetic construct
  source 1..21: mol_type = other RNA
aactcattaacgcttgctttc

SEQ ID NO: 18577 - RNA, 21 nt, synthetic construct
  source 1..21: mol_type = other RNA
aactccattactggcttgtac

SEQ ID NO: 18578 - RNA, 21 nt, synthetic construct
  source 1..21: mol_type = other RNA
aactcctaaaactttaagaaa

SEQ ID NO: 18579 - RNA, 21 nt, synthetic construct
  source 1..21: mol_type = other RNA
aactctcactcatacttgatc

SEQ ID NO: 18580 - RNA, 21 nt, synthetic construct
  source 1..21: mol_type = other RNA
aactgatctcagatgcctgtg

SEQ ID NO: 18581 - RNA, 21 nt, synthetic construct
  source 1..21: mol_type = other RNA
aactgcaattcattccatgtg

SEQ ID NO: 18582 - RNA, 21 nt, synthetic construct
  source 1..21: mol_type = other RNA
aactgcccttttaaaaaagca

SEQ ID NO: 18583 - RNA, 21 nt, synthetic construct
  source 1..21: mol_type = other RNA
aactgctcaggagtcagaaga

SEQ ID NO: 18584 - RNA, 21 nt, synthetic construct
  source 1..21: mol_type = other RNA
aactgcttttttaaaagggca

SEQ ID NO: 18585 - RNA, 21 nt, synthetic construct
  source 1..21: mol_type = other RNA
aactggtaagaacagaaatga

SEQ ID NO: 18586 - RNA, 21 nt, synthetic construct
  source 1..21: mol_type = other RNA
aactgtcttgggccacatata

SEQ ID NO: 18587 - RNA, 21 nt, synthetic construct
  source 1..21: mol_type = other RNA
aactgtggacagtatagctgt

SEQ ID NO: 18588 - RNA, 21 nt, synthetic construct
  source 1..21: mol_type = other RNA
aactgttacaggagctacata

SEQ ID NO: 18589 - RNA, 21 nt, synthetic construct
  source 1..21: mol_type = other RNA
aacttgaatgaagaataggtc

SEQ ID NO: 18590 - RNA, 21 nt, synthetic construct
  source 1..21: mol_type = other RNA
aacttgctgtaaacagtacaa

SEQ ID NO: 18591 - RNA, 21 nt, synthetic construct
  source 1..21: mol_type = other RNA
aacttgtaggacagaaattta

SEQ ID NO: 18592 - RNA, 21 nt, synthetic construct
  source 1..21: mol_type = other RNA
aactttaagtaaatggagtga

SEQ ID NO: 18593 - RNA, 21 nt, synthetic construct
  source 1..21: mol_type = other RNA
aagaaaaagggagatgttgcc

SEQ ID NO: 18594 - RNA, 21 nt, synthetic construct
  source 1..21: mol_type = other RNA
aagaaaactgcttttttaaaa

SEQ ID NO: 18595 - RNA, 21 nt, synthetic construct
  source 1..21: mol_type = other RNA
aagaacagaaatgagaggtat

SEQ ID NO: 18596 - RNA, 21 nt, synthetic construct
  source 1..21: mol_type = other RNA
aagaaccaccccacaaagata

SEQ ID NO: 18597 - RNA, 21 nt, synthetic construct
  source 1..21: mol_type = other RNA
aagaacgtgaactagggagga

SEQ ID NO: 18598 - RNA, 21 nt, synthetic construct
  source 1..21: mol_type = other RNA
aagaactgtcttgggccacat

SEQ ID NO: 18599 - RNA, 21 nt, synthetic construct
  source 1..21: mol_type = other RNA
aagaataggtctgtgtgatac

SEQ ID NO: 18600 - RNA, 21 nt, synthetic construct
  source 1..21: mol_type = other RNA
aagacactattccttcaaaaa

SEQ ID NO: 18601 - RNA, 21 nt, synthetic construct
  source 1..21: mol_type = other RNA
aagacagagacagcaatttgg

SEQ ID NO: 18602 - RNA, 21 nt, synthetic construct
  source 1..21: mol_type = other RNA
aagacagttcttgcagtgtgg

SEQ ID NO: 18603 - RNA, 21 nt, synthetic construct
  source 1..21: mol_type = other RNA
aagacatttacatgtcgctca

SEQ ID NO: 18604 - RNA, 21 nt, synthetic construct
  source 1..21: mol_type = other RNA
aagacggtcagggacagaatc

SEQ ID NO: 18605 - RNA, 21 nt, synthetic construct
  source 1..21: mol_type = other RNA
aagagaaaaccatcaatgtcc

SEQ ID NO: 18606 - RNA, 21 nt, synthetic construct
  source 1..21: mol_type = other RNA
aagagagggagaaagctagtg

SEQ ID NO: 18607 - RNA, 21 nt, synthetic construct
  source 1..21: mol_type = other RNA
aagagtcaagccccagctcaa

SEQ ID NO: 18608 - RNA, 21 nt, synthetic construct
  source 1..21: mol_type = other RNA
aagataaacatttaagaacgt

SEQ ID NO: 18609 - RNA, 21 nt, synthetic construct
  source 1..21: mol_type = other RNA
aagataacactaaagacagag

SEQ ID NO: 18610 - RNA, 21 nt, synthetic construct
  source 1..21: mol_type = other RNA
aagatagagcatgaaaatgac

SEQ ID NO: 18611 - RNA, 21 nt, synthetic construct
  source 1..21: mol_type = other RNA
aagatatatgacgtctctatg

SEQ ID NO: 18612 - RNA, 21 nt, synthetic construct
  source 1..21: mol_type = other RNA
aagatatgatgcttagagctc

SEQ ID NO: 18613 - RNA, 21 nt, synthetic construct
  source 1..21: mol_type = other RNA
aagatcaagagagggagaaag

SEQ ID NO: 18614 - RNA, 21 nt, synthetic construct
  source 1..21: mol_type = other RNA
aagatcacctggactgtgaag

SEQ ID NO: 18615 - RNA, 21 nt, synthetic construct
  source 1..21: mol_type = other RNA
aagatgcctggtagggatgca

SEQ ID NO: 18616 - RNA, 21 nt, synthetic construct
  source 1..21: mol_type = other RNA
aagatggatcaaaagataaca

SEQ ID NO: 18617 - RNA, 21 nt, synthetic construct
  source 1..21: mol_type = other RNA
aagatgtaagatggatcaaaa

SEQ ID NO: 18618 - RNA, 21 nt, synthetic construct
  source 1..21: mol_type = other RNA
aagatgtgcctgccttggaca

SEQ ID NO: 18619 - RNA, 21 nt, synthetic construct
  source 1..21: mol_type = other RNA
aagattggacacccctggttt

SEQ ID NO: 18620 - RNA, 21 nt, synthetic construct
  source 1..21: mol_type = other RNA
aagatttaacctgatgctaca

SEQ ID NO: 18621 - RNA, 21 nt, synthetic construct
  source 1..21: mol_type = other RNA
aagcaagcgttaatgagtttg

SEQ ID NO: 18622 - RNA, 21 nt, synthetic construct
  source 1..21: mol_type = other RNA
aagcactgctgggtaagagtc

SEQ ID NO: 18623 - RNA, 21 nt, synthetic construct
  source 1..21: mol_type = other RNA
aagcactggtttctcaagcaa

SEQ ID NO: 18624 - RNA, 21 nt, synthetic construct
  source 1..21: mol_type = other RNA
aagcagcaagggtagcattcc

SEQ ID NO: 18625 - RNA, 21 nt, synthetic construct
  source 1..21: mol_type = other RNA
aagcagtagtcaagatcacct

SEQ ID NO: 18626 - RNA, 21 nt, synthetic construct
  source 1..21: mol_type = other RNA
aagcagttaaatgaaatgtaa

SEQ ID NO: 18627 - RNA, 21 nt, synthetic construct
  source 1..21: mol_type = other RNA
aagcagttttcttctgactcc

SEQ ID NO: 18628 - RNA, 21 nt, synthetic construct
  source 1..21: mol_type = other RNA
aagcatcatatcttgagttat

SEQ ID NO: 18629 - RNA, 21 nt, synthetic construct
  source 1..21: mol_type = other RNA
aagcatgatcacctgagtttt

SEQ ID NO: 18630 - RNA, 21 nt, synthetic construct
  source 1..21: mol_type = other RNA
aagcatttggtgttaaaatgt

SEQ ID NO: 18631 - RNA, 21 nt, synthetic construct
  source 1..21: mol_type = other RNA
aagccagtaatggagtttcac

SEQ ID NO: 18632 - RNA, 21 nt, synthetic construct
  source 1..21: mol_type = other RNA
aagccccagctcaagccttaa

SEQ ID NO: 18633 - RNA, 21 nt, synthetic construct
  source 1..21: mol_type = other RNA
aagccgaaagattggacaccc

SEQ ID NO: 18634 - RNA, 21 nt, synthetic construct
  source 1..21: mol_type = other RNA
aagccttaatttgtggtggaa

SEQ ID NO: 18635 - RNA, 21 nt, synthetic construct
  source 1..21: mol_type = other RNA
aagcgttaatgagtttggatt

SEQ ID NO: 18636 - RNA, 21 nt, synthetic construct
  source 1..21: mol_type = other RNA
aagctaagtccaacaaaccat

SEQ ID NO: 18637 - RNA, 21 nt, synthetic construct
  source 1..21: mol_type = other RNA
aagctagtgctatgtctgaat

SEQ ID NO: 18638 - RNA, 21 nt, synthetic construct
  source 1..21: mol_type = other RNA
aagctatcacacaggcatctg

SEQ ID NO: 18639 - RNA, 21 nt, synthetic construct
  source 1..21: mol_type = other RNA
aagctctctggcccattacat

SEQ ID NO: 18640 - RNA, 21 nt, synthetic construct
  source 1..21: mol_type = other RNA
aagctgaagctctctggccca

SEQ ID NO: 18641 - RNA, 21 nt, synthetic construct
  source 1..21: mol_type = other RNA
aagctgtcctgggtcccatgc

SEQ ID NO: 18642 - RNA, 21 nt, synthetic construct
  source 1..21: mol_type = other RNA
aagctgttaaattgaggaaag

SEQ ID NO: 18643 - RNA, 21 nt, synthetic construct
  source 1..21: mol_type = other RNA
aaggaaataaaagctgaagct

SEQ ID NO: 18644 - RNA, 21 nt, synthetic construct
  source 1..21: mol_type = other RNA
aaggaagatagagcatgaaaa

SEQ ID NO: 18645 - RNA, 21 nt, synthetic construct
  source 1..21: mol_type = other RNA
aaggaatagtgtcttgtactc

SEQ ID NO: 18646 - RNA, 21 nt, synthetic construct
  source 1..21: mol_type = other RNA
aaggcaggcacatctttaaaa

SEQ ID NO: 18647 - RNA, 21 nt, synthetic construct
  source 1..21: mol_type = other RNA
aaggcatgaccaaaggggaga

SEQ ID NO: 18648 - RNA, 21 nt, synthetic construct
  source 1..21: mol_type = other RNA
aaggcttgagctggggcttga

SEQ ID NO: 18649 - RNA, 21 nt, synthetic construct
  source 1..21: mol_type = other RNA
aagggagatgttgcctaacct

SEQ ID NO: 18650 - RNA, 21 nt, synthetic construct
  source 1..21: mol_type = other RNA
aagggcagtttgggtcataga

SEQ ID NO: 18651 - RNA, 21 nt, synthetic construct
  source 1..21: mol_type = other RNA
aaggggagatgacatttgaat

SEQ ID NO: 18652 - RNA, 21 nt, synthetic construct
  source 1..21: mol_type = other RNA
aaggggtagagagcctgggga

SEQ ID NO: 18653 - RNA, 21 nt, synthetic construct
  source 1..21: mol_type = other RNA
aagggtagcattccaaaaaga

SEQ ID NO: 18654 - RNA, 21 nt, synthetic construct
  source 1..21: mol_type = other RNA
aagggtctcaaatggtataaa

SEQ ID NO: 18655 - RNA, 21 nt, synthetic construct
  source 1..21: mol_type = other RNA
aaggtaatttaaatcagcaat

SEQ ID NO: 18656 - RNA, 21 nt, synthetic construct
  source 1..21: mol_type = other RNA
aaggtccctggatagactttc

SEQ ID NO: 18657 - RNA, 21 nt, synthetic construct
  source 1..21: mol_type = other RNA
aagtaaatggagtgagcgaca

SEQ ID NO: 18658 - RNA, 21 nt, synthetic construct
  source 1..21: mol_type = other RNA
aagtacaacaaatggaaaatg

SEQ ID NO: 18659 - RNA, 21 nt, synthetic construct
  source 1..21: mol_type = other RNA
aagtagtgataatccgcagtc

SEQ ID NO: 18660 - RNA, 21 nt, synthetic construct
  source 1..21: mol_type = other RNA
aagtatgagtgagagttgcta

SEQ ID NO: 18661 - RNA, 21 nt, synthetic construct
  source 1..21: mol_type = other RNA
aagtcacatggaatgaattgc

SEQ ID NO: 18662 - RNA, 21 nt, synthetic construct
  source 1..21: mol_type = other RNA
aagtccaacaaaccattttta

SEQ ID NO: 18663 - RNA, 21 nt, synthetic construct
  source 1..21: mol_type = other RNA
aagtccggggctacagctata

SEQ ID NO: 18664 - RNA, 21 nt, synthetic construct
  source 1..21: mol_type = other RNA
aagtctatccagggaccttat

SEQ ID NO: 18665 - RNA, 21 nt, synthetic construct
  source 1..21: mol_type = other RNA
aagtgaaaacttgtaggacag

SEQ ID NO: 18666 - RNA, 21 nt, synthetic construct
  source 1..21: mol_type = other RNA
aagtggctggtatgactaaag

SEQ ID NO: 18667 - RNA, 21 nt, synthetic construct
  source 1..21: mol_type = other RNA
aagtgtagcatcaggttaaat

SEQ ID NO: 18668 - RNA, 21 nt, synthetic construct
  source 1..21: mol_type = other RNA
aagtgtttccaggaagtgaaa

SEQ ID NO: 18669 - RNA, 21 nt, synthetic construct
  source 1..21: mol_type = other RNA
aagttctgatatatttaacta

SEQ ID NO: 18670 - RNA, 21 nt, synthetic construct
  source 1..21: mol_type = other RNA
aagttggctagacatcagagt

SEQ ID NO: 18671 - RNA, 21 nt, synthetic construct
  source 1..21: mol_type = other RNA
aagttgtctaacccgcgggcc

SEQ ID NO: 18672 - RNA, 21 nt, synthetic construct
  source 1..21: mol_type = other RNA
aagttttatcctgaggaatta

SEQ ID NO: 18673 - RNA, 21 nt, synthetic construct
  source 1..21: mol_type = other RNA
aagttttcacttcctggaaac

SEQ ID NO: 18674 - RNA, 21 nt, synthetic construct
  source 1..21: mol_type = other RNA
aataaaagcactgctgggtaa

SEQ ID NO: 18675 - RNA, 21 nt, synthetic construct
  source 1..21: mol_type = other RNA
aataaaagctgaagctctctg

SEQ ID NO: 18676 - RNA, 21 nt, synthetic construct
  source 1..21: mol_type = other RNA
aataccaacattttaacacca

SEQ ID NO: 18677 - RNA, 21 nt, synthetic construct
  source 1..21: mol_type = other RNA
aatacctctcatttctgttct

SEQ ID NO: 18678 - RNA, 21 nt, synthetic construct
  source 1..21: mol_type = other RNA
aatacgtggacattgatggtt

SEQ ID NO: 18679 - RNA, 21 nt, synthetic construct
  source 1..21: mol_type = other RNA
aatactagaggagcaagtaca

SEQ ID NO: 18680 - RNA, 21 nt, synthetic construct
  source 1..21: mol_type = other RNA
aataggtctgtgtgatacaaa

SEQ ID NO: 18681 - RNA, 21 nt, synthetic construct
  source 1..21: mol_type = other RNA
aatagtgtcttgtactcctga

SEQ ID NO: 18682 - RNA, 21 nt, synthetic construct
  source 1..21: mol_type = other RNA
aatatatcagaacttgaatga

SEQ ID NO: 18683 - RNA, 21 nt, synthetic construct
  source 1..21: mol_type = other RNA
aatatgacctctctcctgaag

SEQ ID NO: 18684 - RNA, 21 nt, synthetic construct
  source 1..21: mol_type = other RNA
aatcaagataaacatttaaga

SEQ ID NO: 18685 - RNA, 21 nt, synthetic construct
  source 1..21: mol_type = other RNA
aatcaagtgtttccaggaagt

SEQ ID NO: 18686 - RNA, 21 nt, synthetic construct
  source 1..21: mol_type = other RNA
aatcacaaagtaagttttatc

SEQ ID NO: 18687 - RNA, 21 nt, synthetic construct
  source 1..21: mol_type = other RNA
aatcagcaatgacaacaaccc

SEQ ID NO: 18688 - RNA, 21 nt, synthetic construct
  source 1..21: mol_type = other RNA
aatcatagagacgtcatatat

SEQ ID NO: 18689 - RNA, 21 nt, synthetic construct
  source 1..21: mol_type = other RNA
aatcatcctaacaagatgtaa

SEQ ID NO: 18690 - RNA, 21 nt, synthetic construct
  source 1..21: mol_type = other RNA
aatccaaactcattaacgctt

SEQ ID NO: 18691 - RNA, 21 nt, synthetic construct
  source 1..21: mol_type = other RNA
aatccacagaacaagtccggg

SEQ ID NO: 18692 - RNA, 21 nt, synthetic construct
  source 1..21: mol_type = other RNA
aatcccagctaaggaaaaagg

SEQ ID NO: 18693 - RNA, 21 nt, synthetic construct
  source 1..21: mol_type = other RNA
aatcctgcagattcaaatgtc

SEQ ID NO: 18694 - RNA, 21 nt, synthetic construct
  source 1..21: mol_type = other RNA
aatctcacctccctaaaattc

SEQ ID NO: 18695 - RNA, 21 nt, synthetic construct
  source 1..21: mol_type = other RNA
aatctgcaggattaaaagcag

SEQ ID NO: 18696 - RNA, 21 nt, synthetic construct
  source 1..21: mol_type = other RNA
aatctgtctggtttcgcgaga

SEQ ID NO: 18697 - RNA, 21 nt, synthetic construct
  source 1..21: mol_type = other RNA
aatcttgagcattggaaaagt

SEQ ID NO: 18698 - RNA, 21 nt, synthetic construct
  source 1..21: mol_type = other RNA
aatctttcggcttccctgggc

SEQ ID NO: 18699 - RNA, 21 nt, synthetic construct
  source 1..21: mol_type = other RNA
aatgaaaaagctgttaaattg

SEQ ID NO: 18700 - RNA, 21 nt, synthetic construct
  source 1..21: mol_type = other RNA
aatgaaatgtaatgggccaga

SEQ ID NO: 18701 - RNA, 21 nt, synthetic construct
  source 1..21: mol_type = other RNA
aatgaacccagcctaaatttc

SEQ ID NO: 18702 - RNA, 21 nt, synthetic construct
  source 1..21: mol_type = other RNA
aatgaagaataggtctgtgtg

SEQ ID NO: 18703 - RNA, 21 nt, synthetic construct
  source 1..21: mol_type = other RNA
aatgaattgcagttacccaaa

SEQ ID NO: 18704 - RNA, 21 nt, synthetic construct
  source 1..21: mol_type = other RNA
aatgaattttagggaggtgag

SEQ ID NO: 18705 - RNA, 21 nt, synthetic construct
  source 1..21: mol_type = other RNA
aatgacaacaaccccagaatt

SEQ ID NO: 18706 - RNA, 21 nt, synthetic construct
  source 1..21: mol_type = other RNA
aatgacaggtgaaactccatt

SEQ ID NO: 18707 - RNA, 21 nt, synthetic construct
  source 1..21: mol_type = other RNA
aatgagaggtatttagaggaa

SEQ ID NO: 18708 - RNA, 21 nt, synthetic construct
  source 1..21: mol_type = other RNA
aatgataagtagtgataatcc

SEQ ID NO: 18709 - RNA, 21 nt, synthetic construct
  source 1..21: mol_type = other RNA
aatgcataatgaattttaggg

SEQ ID NO: 18710 - RNA, 21 nt, synthetic construct
  source 1..21: mol_type = other RNA
aatgctacccttgctgctttt

SEQ ID NO: 18711 - RNA, 21 nt, synthetic construct
  source 1..21: mol_type = other RNA
aatgctcaagattaataaaat

SEQ ID NO: 18712 - RNA, 21 nt, synthetic construct
  source 1..21: mol_type = other RNA
aatgctccaaaaatgataagt

SEQ ID NO: 18713 - RNA, 21 nt, synthetic construct
  source 1..21: mol_type = other RNA
aatggaaaatgggatcaagta

SEQ ID NO: 18714 - RNA, 21 nt, synthetic construct
  source 1..21: mol_type = other RNA
aatggaatctcacctccctaa

SEQ ID NO: 18715 - RNA, 21 nt, synthetic construct
  source 1..21: mol_type = other RNA
aatggagtgagcgacatgtaa

SEQ ID NO: 18716 - RNA, 21 nt, synthetic construct
  source 1..21: mol_type = other RNA
aatggagtttcacctgtcatt

SEQ ID NO: 18717 - RNA, 21 nt, synthetic construct
  source 1..21: mol_type = other RNA
aatgggatcaagtatgagtga

SEQ ID NO: 18718 - RNA, 21 nt, synthetic construct
  source 1..21: mol_type = other RNA
aatgggccagagagcttcagc

SEQ ID NO: 18719 - RNA, 21 nt, synthetic construct
  source 1..21: mol_type = other RNA
aatggtataaaactcaggtga

SEQ ID NO: 18720 - RNA, 21 nt, synthetic construct
  source 1..21: mol_type = other RNA
aatggtttgttggacttagct

SEQ ID NO: 18721 - RNA, 21 nt, synthetic construct
  source 1..21: mol_type = other RNA
aatgtaatgggccagagagct

SEQ ID NO: 18722 - RNA, 21 nt, synthetic construct
  source 1..21: mol_type = other RNA
aatgtcaaaccataaagacat

SEQ ID NO: 18723 - RNA, 21 nt, synthetic construct
  source 1..21: mol_type = other RNA
aatgtcatctcccctttggtc

SEQ ID NO: 18724 - RNA, 21 nt, synthetic construct
  source 1..21: mol_type = other RNA
aatgtccacgtattctgtaat

SEQ ID NO: 18725 - RNA, 21 nt, synthetic construct
  source 1..21: mol_type = other RNA
aatgtgatgcataaggtccct

SEQ ID NO: 18726 - RNA, 21 nt, synthetic construct
  source 1..21: mol_type = other RNA
aatgttggtattataattcct

SEQ ID NO: 18727 - RNA, 21 nt, synthetic construct
  source 1..21: mol_type = other RNA
aattaaggcttgagctggggc

SEQ ID NO: 18728 - RNA, 21 nt, synthetic construct
  source 1..21: mol_type = other RNA
aattaccttaactattctgag

SEQ ID NO: 18729 - RNA, 21 nt, synthetic construct
  source 1..21: mol_type = other RNA
aattactatgacccacgcagt

SEQ ID NO: 18730 - RNA, 21 nt, synthetic construct
  source 1..21: mol_type = other RNA
aattcagttctttagtcatac

SEQ ID NO: 18731 - RNA, 21 nt, synthetic construct
  source 1..21: mol_type = other RNA
aattcatcctgtaaaccaggg

SEQ ID NO: 18732 - RNA, 21 nt, synthetic construct
  source 1..21: mol_type = other RNA
aattcattccatgtgacttca

SEQ ID NO: 18733 - RNA, 21 nt, synthetic construct
  source 1..21: mol_type = other RNA
aattcctcaggataaaactta

SEQ ID NO: 18734 - RNA, 21 nt, synthetic construct
  source 1..21: mol_type = other RNA
aattctctgtaaagcagtagt

SEQ ID NO: 18735 - RNA, 21 nt, synthetic construct
  source 1..21: mol_type = other RNA
aattctggggttgttgtcatt

SEQ ID NO: 18736 - RNA, 21 nt, synthetic construct
  source 1..21: mol_type = other RNA
aattctgttctcgtgaatgtg

SEQ ID NO: 18737 - RNA, 21 nt, synthetic construct
  source 1..21: mol_type = other RNA
aattgaggaaagtctatccag

SEQ ID NO: 18738 - RNA, 21 nt, synthetic construct
  source 1..21: mol_type = other RNA
aattgcaactgtggacagtat

SEQ ID NO: 18739 - RNA, 21 nt, synthetic construct
  source 1..21: mol_type = other RNA
aattgcagttacccaaatcat

SEQ ID NO: 18740 - RNA, 21 nt, synthetic construct
  source 1..21: mol_type = other RNA
aattgctgtctctgtctttag

SEQ ID NO: 18741 - RNA, 21 nt, synthetic construct
  source 1..21: mol_type = other RNA
aattggatctgaggttaggca

SEQ ID NO: 18742 - RNA, 21 nt, synthetic construct
  source 1..21: mol_type = other RNA
aatttaaatcagcaatgacaa

SEQ ID NO: 18743 - RNA, 21 nt, synthetic construct
  source 1..21: mol_type = other RNA
aatttaggctgggttcatttg

SEQ ID NO: 18744 - RNA, 21 nt, synthetic construct
  source 1..21: mol_type = other RNA
aatttctgtcctacaagtttt

SEQ ID NO: 18745 - RNA, 21 nt, synthetic construct
  source 1..21: mol_type = other RNA
aatttgaattgcaactgtgga

SEQ ID NO: 18746 - RNA, 21 nt, synthetic construct
  source 1..21: mol_type = other RNA
aatttggaagctatcacacag

SEQ ID NO: 18747 - RNA, 21 nt, synthetic construct
  source 1..21: mol_type = other RNA
aatttgtggtggaaccaatct

SEQ ID NO: 18748 - RNA, 21 nt, synthetic construct
  source 1..21: mol_type = other RNA
aattttagcttttgcttgaga

SEQ ID NO: 18749 - RNA, 21 nt, synthetic construct
  source 1..21: mol_type = other RNA
aattttagggaggtgagattc

SEQ ID NO: 18750 - RNA, 21 nt, synthetic construct
  source 1..21: mol_type = other RNA
acaaaccatttttaaagatgt

SEQ ID NO: 18751 - RNA, 21 nt, synthetic construct
  source 1..21: mol_type = other RNA
acaaactgctcaggagtcaga

SEQ ID NO: 18752 - RNA, 21 nt, synthetic construct
  source 1..21: mol_type = other RNA
acaaagatatatgacgtctct

SEQ ID NO: 18753 - RNA, 21 nt, synthetic construct
  source 1..21: mol_type = other RNA
acaaagtaagttttatcctga

SEQ ID NO: 18754 - RNA, 21 nt, synthetic construct
  source 1..21: mol_type = other RNA
acaaatatgacctctctcctg

SEQ ID NO: 18755 - RNA, 21 nt, synthetic construct
  source 1..21: mol_type = other RNA
acaaatgaacccagcctaaat

SEQ ID NO: 18756 - RNA, 21 nt, synthetic construct
  source 1..21: mol_type = other RNA
acaaatggaaaatgggatcaa

SEQ ID NO: 18757 - RNA, 21 nt, synthetic construct
  source 1..21: mol_type = other RNA
acaaattaaggcttgagctgg

SEQ ID NO: 18758 - RNA, 21 nt, synthetic construct
  source 1..21: mol_type = other RNA
acaacaaatggaaaatgggat

SEQ ID NO: 18759 - RNA, 21 nt, synthetic construct
  source 1..21: mol_type = other RNA
acaacaaccccagaattacta

SEQ ID NO: 18760 - RNA, 21 nt, synthetic construct
  source 1..21: mol_type = other RNA
acaacagaccatggaaggcat

SEQ ID NO: 18761 - RNA, 21 nt, synthetic construct
  source 1..21: mol_type = other RNA
acaacagtgaaagcaagcgtt

SEQ ID NO: 18762 - RNA, 21 nt, synthetic construct
  source 1..21: mol_type = other RNA
acaaccccagaattactatga

SEQ ID NO: 18763 - RNA, 21 nt, synthetic construct
  source 1..21: mol_type = other RNA
acaacttgctgtaaacagtac

SEQ ID NO: 18764 - RNA, 21 nt, synthetic construct
  source 1..21: mol_type = other RNA
acaagacactattccttcaaa

SEQ ID NO: 18765 - RNA, 21 nt, synthetic construct
  source 1..21: mol_type = other RNA
acaagatgtaagatggatcaa

SEQ ID NO: 18766 - RNA, 21 nt, synthetic construct
  source 1..21: mol_type = other RNA
acaagcagttaaatgaaatgt

SEQ ID NO: 18767 - RNA, 21 nt, synthetic construct
  source 1..21: mol_type = other RNA
acaagccagtaatggagtttc

SEQ ID NO: 18768 - RNA, 21 nt, synthetic construct
  source 1..21: mol_type = other RNA
acaagtccggggctacagcta

SEQ ID NO: 18769 - RNA, 21 nt, synthetic construct
  source 1..21: mol_type = other RNA
acaagttttcacttcctggaa

SEQ ID NO: 18770 - RNA, 21 nt, synthetic construct
  source 1..21: mol_type = other RNA
acaatcacaaagtaagtttta

SEQ ID NO: 18771 - RNA, 21 nt, synthetic construct
  source 1..21: mol_type = other RNA
acaatcatcctaacaagatgt

SEQ ID NO: 18772 - RNA, 21 nt, synthetic construct
  source 1..21: mol_type = other RNA
acacaaatatgacctctctcc

SEQ ID NO: 18773 - RNA, 21 nt, synthetic construct
  source 1..21: mol_type = other RNA
acacacaaatatgacctctct

SEQ ID NO: 18774 - RNA, 21 nt, synthetic construct
  source 1..21: mol_type = other RNA
acacacacaaatatgacctct

SEQ ID NO: 18775 - RNA, 21 nt, synthetic construct
  source 1..21: mol_type = other RNA
acacagacctattcttcattc

SEQ ID NO: 18776 - RNA, 21 nt, synthetic construct
  source 1..21: mol_type = other RNA
acacaggcatctgagatcagt

SEQ ID NO: 18777 - RNA, 21 nt, synthetic construct
  source 1..21: mol_type = other RNA
acaccaaatgctttttatatt

SEQ ID NO: 18778 - RNA, 21 nt, synthetic construct
  source 1..21: mol_type = other RNA
acaccaggctacccaagatca

SEQ ID NO: 18779 - RNA, 21 nt, synthetic construct
  source 1..21: mol_type = other RNA
acacccctggtttacaggatg

SEQ ID NO: 18780 - RNA, 21 nt, synthetic construct
  source 1..21: mol_type = other RNA
acactaaagacagagacagca

SEQ ID NO: 18781 - RNA, 21 nt, synthetic construct
  source 1..21: mol_type = other RNA
acactattccttcaaaaagct

SEQ ID NO: 18782 - RNA, 21 nt, synthetic construct
  source 1..21: mol_type = other RNA
acactgcaagaactgtcttgg

SEQ ID NO: 18783 - RNA, 21 nt, synthetic construct
  source 1..21: mol_type = other RNA
acacttgattggaggagctct

SEQ ID NO: 18784 - RNA, 21 nt, synthetic construct
  source 1..21: mol_type = other RNA
acactttggtggtgcagcaag

SEQ ID NO: 18785 - RNA, 21 nt, synthetic construct
  source 1..21: mol_type = other RNA
acagaaatgagaggtatttag

SEQ ID NO: 18786 - RNA, 21 nt, synthetic construct
  source 1..21: mol_type = other RNA
acagaaatttaggctgggttc

SEQ ID NO: 18787 - RNA, 21 nt, synthetic construct
  source 1..21: mol_type = other RNA
acagaacaagtccggggctac

SEQ ID NO: 18788 - RNA, 21 nt, synthetic construct
  source 1..21: mol_type = other RNA
acagaatacgtggacattgat

SEQ ID NO: 18789 - RNA, 21 nt, synthetic construct
  source 1..21: mol_type = other RNA
acagaatcccagctaaggaaa

SEQ ID NO: 18790 - RNA, 21 nt, synthetic construct
  source 1..21: mol_type = other RNA
acagaattcatcctgtaaacc

SEQ ID NO: 18791 - RNA, 21 nt, synthetic construct
  source 1..21: mol_type = other RNA
acagacataaagcatgatcac

SEQ ID NO: 18792 - RNA, 21 nt, synthetic construct
  source 1..21: mol_type = other RNA
acagaccatggaaggcatgac

SEQ ID NO: 18793 - RNA, 21 nt, synthetic construct
  source 1..21: mol_type = other RNA
acagacctattcttcattcaa

SEQ ID NO: 18794 - RNA, 21 nt, synthetic construct
  source 1..21: mol_type = other RNA
acagagaattggatctgaggt

SEQ ID NO: 18795 - RNA, 21 nt, synthetic construct
  source 1..21: mol_type = other RNA
acagagacagcaatttggaag

SEQ ID NO: 18796 - RNA, 21 nt, synthetic construct
  source 1..21: mol_type = other RNA
acagattggttccaccacaaa

SEQ ID NO: 18797 - RNA, 21 nt, synthetic construct
  source 1..21: mol_type = other RNA
acagcaagttgtctaacccgc

SEQ ID NO: 18798 - RNA, 21 nt, synthetic construct
  source 1..21: mol_type = other RNA
acagcaatttggaagctatca

SEQ ID NO: 18799 - RNA, 21 nt, synthetic construct
  source 1..21: mol_type = other RNA
acagctatactgtccacagtt

SEQ ID NO: 18800 - RNA, 21 nt, synthetic construct
  source 1..21: mol_type = other RNA
acagctttttcatttttcact

SEQ ID NO: 18801 - RNA, 21 nt, synthetic construct
  source 1..21: mol_type = other RNA
acaggagctacatagttaaat

SEQ ID NO: 18802 - RNA, 21 nt, synthetic construct
  source 1..21: mol_type = other RNA
acaggatgaattctgttctcg

SEQ ID NO: 18803 - RNA, 21 nt, synthetic construct
  source 1..21: mol_type = other RNA
acaggcatctgagatcagtta

SEQ ID NO: 18804 - RNA, 21 nt, synthetic construct
  source 1..21: mol_type = other RNA
acaggtgaaactccattactg

SEQ ID NO: 18805 - RNA, 21 nt, synthetic construct
  source 1..21: mol_type = other RNA
acagtacaagccagtaatgga

SEQ ID NO: 18806 - RNA, 21 nt, synthetic construct
  source 1..21: mol_type = other RNA
acagtatagctgtagccccgg

SEQ ID NO: 18807 - RNA, 21 nt, synthetic construct
  source 1..21: mol_type = other RNA
acagtccaggtgatcttgact

SEQ ID NO: 18808 - RNA, 21 nt, synthetic construct
  source 1..21: mol_type = other RNA
acagtgaaagcaagcgttaat

SEQ ID NO: 18809 - RNA, 21 nt, synthetic construct
  source 1..21: mol_type = other RNA
acagttcttgcagtgtggccc

SEQ ID NO: 18810 - RNA, 21 nt, synthetic construct
  source 1..21: mol_type = other RNA
acagtttaatggaatctcacc

SEQ ID NO: 18811 - RNA, 21 nt, synthetic construct
  source 1..21: mol_type = other RNA
acataaagcatgatcacctga

SEQ ID NO: 18812 - RNA, 21 nt, synthetic construct
  source 1..21: mol_type = other RNA
acatactacacacacaaatat

SEQ ID NO: 18813 - RNA, 21 nt, synthetic construct
  source 1..21: mol_type = other RNA
acatagcactagctttctccc

SEQ ID NO: 18814 - RNA, 21 nt, synthetic construct
  source 1..21: mol_type = other RNA
acatataaaggacagctgatg

SEQ ID NO: 18815 - RNA, 21 nt, synthetic construct
  source 1..21: mol_type = other RNA
acatcagagtatactaggagc

SEQ ID NO: 18816 - RNA, 21 nt, synthetic construct
  source 1..21: mol_type = other RNA
acatctccctttttcttcctc

SEQ ID NO: 18817 - RNA, 21 nt, synthetic construct
  source 1..21: mol_type = other RNA
acatcttgttaggatgattgt

SEQ ID NO: 18818 - RNA, 21 nt, synthetic construct
  source 1..21: mol_type = other RNA
acatctttaaaaatggtttgt

SEQ ID NO: 18819 - RNA, 21 nt, synthetic construct
  source 1..21: mol_type = other RNA
acatggaatgaattgcagtta

SEQ ID NO: 18820 - RNA, 21 nt, synthetic construct
  source 1..21: mol_type = other RNA
acatgtaaatgtctttatggt

SEQ ID NO: 18821 - RNA, 21 nt, synthetic construct
  source 1..21: mol_type = other RNA
acatgtcgctcactccattta

SEQ ID NO: 18822 - RNA, 21 nt, synthetic construct
  source 1..21: mol_type = other RNA
acattcacgagaacagaattc

SEQ ID NO: 18823 - RNA, 21 nt, synthetic construct
  source 1..21: mol_type = other RNA
acattgatggttttctctttt

SEQ ID NO: 18824 - RNA, 21 nt, synthetic construct
  source 1..21: mol_type = other RNA
acatttaagaacgtgaactag

SEQ ID NO: 18825 - RNA, 21 nt, synthetic construct
  source 1..21: mol_type = other RNA
acatttacatgtcgctcactc

SEQ ID NO: 18826 - RNA, 21 nt, synthetic construct
  source 1..21: mol_type = other RNA
acatttgaatctgcaggatta

SEQ ID NO: 18827 - RNA, 21 nt, synthetic construct
  source 1..21: mol_type = other RNA
accaaaggggagatgacattt

SEQ ID NO: 18828 - RNA, 21 nt, synthetic construct
  source 1..21: mol_type = other RNA
accaaagtgtagcatcaggtt

SEQ ID NO: 18829 - RNA, 21 nt, synthetic construct
  source 1..21: mol_type = other RNA
accaaatgctttttatattgc

SEQ ID NO: 18830 - RNA, 21 nt, synthetic construct
  source 1..21: mol_type = other RNA
accaacattttaacaccaaat

SEQ ID NO: 18831 - RNA, 21 nt, synthetic construct
  source 1..21: mol_type = other RNA
accaatctgtctggtttcgcg

SEQ ID NO: 18832 - RNA, 21 nt, synthetic construct
  source 1..21: mol_type = other RNA
accacaaattaaggcttgagc

SEQ ID NO: 18833 - RNA, 21 nt, synthetic construct
  source 1..21: mol_type = other RNA
accaccaaagtgtagcatcag

SEQ ID NO: 18834 - RNA, 21 nt, synthetic construct
  source 1..21: mol_type = other RNA
accaccccacaaagatatatg

SEQ ID NO: 18835 - RNA, 21 nt, synthetic construct
  source 1..21: mol_type = other RNA
accagacagattggttccacc

SEQ ID NO: 18836 - RNA, 21 nt, synthetic construct
  source 1..21: mol_type = other RNA
accagccacttttccaatgct

SEQ ID NO: 18837 - RNA, 21 nt, synthetic construct
  source 1..21: mol_type = other RNA
accaggcatcttagcaactct

SEQ ID NO: 18838 - RNA, 21 nt, synthetic construct
  source 1..21: mol_type = other RNA
accaggctacccaagatcaag

SEQ ID NO: 18839 - RNA, 21 nt, synthetic construct
  source 1..21: mol_type = other RNA
accagtgcttccctccctcac

SEQ ID NO: 18840 - RNA, 21 nt, synthetic construct
  source 1..21: mol_type = other RNA
accagttagtaactgatctca

SEQ ID NO: 18841 - RNA, 21 nt, synthetic construct
  source 1..21: mol_type = other RNA
accataaagacatttacatgt

SEQ ID NO: 18842 - RNA, 21 nt, synthetic construct
  source 1..21: mol_type = other RNA
accatcaatgtccacgtattc

SEQ ID NO: 18843 - RNA, 21 nt, synthetic construct
  source 1..21: mol_type = other RNA
accatggaaggcatgaccaaa

SEQ ID NO: 18844 - RNA, 21 nt, synthetic construct
  source 1..21: mol_type = other RNA
accatttgagacccttgctgc

SEQ ID NO: 18845 - RNA, 21 nt, synthetic construct
  source 1..21: mol_type = other RNA
accatttttaaagatgtgcct

SEQ ID NO: 18846 - RNA, 21 nt, synthetic construct
  source 1..21: mol_type = other RNA
acccaaactgcccttttaaaa

SEQ ID NO: 18847 - RNA, 21 nt, synthetic construct
  source 1..21: mol_type = other RNA
acccaaatcatagagacgtca

SEQ ID NO: 18848 - RNA, 21 nt, synthetic construct
  source 1..21: mol_type = other RNA
acccaagatcaagagagggag

SEQ ID NO: 18849 - RNA, 21 nt, synthetic construct
  source 1..21: mol_type = other RNA
acccacgcagtacaaactgct

SEQ ID NO: 18850 - RNA, 21 nt, synthetic construct
  source 1..21: mol_type = other RNA
acccagcagtgcttttattcc

SEQ ID NO: 18851 - RNA, 21 nt, synthetic construct
  source 1..21: mol_type = other RNA
acccagcctaaatttctgtcc

SEQ ID NO: 18852 - RNA, 21 nt, synthetic construct
  source 1..21: mol_type = other RNA
acccaggacagctttgaatgc

SEQ ID NO: 18853 - RNA, 21 nt, synthetic construct
  source 1..21: mol_type = other RNA
accccacaaagatatatgacg

SEQ ID NO: 18854 - RNA, 21 nt, synthetic construct
  source 1..21: mol_type = other RNA
accccagaattactatgaccc

SEQ ID NO: 18855 - RNA, 21 nt, synthetic construct
  source 1..21: mol_type = other RNA
acccctggtttacaggatgaa

SEQ ID NO: 18856 - RNA, 21 nt, synthetic construct
  source 1..21: mol_type = other RNA
acccctttgcatccctaccag

SEQ ID NO: 18857 - RNA, 21 nt, synthetic construct
  source 1..21: mol_type = other RNA
acccgcgggccgcatgggacc

SEQ ID NO: 18858 - RNA, 21 nt, synthetic construct
  source 1..21: mol_type = other RNA
accctctctccccaggctctc

SEQ ID NO: 18859 - RNA, 21 nt, synthetic construct
  source 1..21: mol_type = other RNA
acccttgctgcaccaccaaag

SEQ ID NO: 18860 - RNA, 21 nt, synthetic construct
  source 1..21: mol_type = other RNA
acccttgctgcttttaatcct

SEQ ID NO: 18861 - RNA, 21 nt, synthetic construct
  source 1..21: mol_type = other RNA
accgtcttcacagtccaggtg

SEQ ID NO: 18862 - RNA, 21 nt, synthetic construct
  source 1..21: mol_type = other RNA
acctattcttcattcaagttc

SEQ ID NO: 18863 - RNA, 21 nt, synthetic construct
  source 1..21: mol_type = other RNA
acctcagatccaattctctgt

SEQ ID NO: 18864 - RNA, 21 nt, synthetic construct
  source 1..21: mol_type = other RNA
acctccctaaaattcattatg

SEQ ID NO: 18865 - RNA, 21 nt, synthetic construct
  source 1..21: mol_type = other RNA
acctctcatttctgttcttac

SEQ ID NO: 18866 - RNA, 21 nt, synthetic construct
  source 1..21: mol_type = other RNA
acctctctcctgaagtcacat

SEQ ID NO: 18867 - RNA, 21 nt, synthetic construct
  source 1..21: mol_type = other RNA
acctgagttttataccatttg

SEQ ID NO: 18868 - RNA, 21 nt, synthetic construct
  source 1..21: mol_type = other RNA
acctgatgctacactttggtg

SEQ ID NO: 18869 - RNA, 21 nt, synthetic construct
  source 1..21: mol_type = other RNA
acctggactgtgaagacggtc

SEQ ID NO: 18870 - RNA, 21 nt, synthetic construct
  source 1..21: mol_type = other RNA
acctgtcattttcatgctcta

SEQ ID NO: 18871 - RNA, 21 nt, synthetic construct
  source 1..21: mol_type = other RNA
accttaactattctgagcttt

SEQ ID NO: 18872 - RNA, 21 nt, synthetic construct
  source 1..21: mol_type = other RNA
accttatgcatcacattcacg

SEQ ID NO: 18873 - RNA, 21 nt, synthetic construct
  source 1..21: mol_type = other RNA
acgagaacagaattcatcctg

SEQ ID NO: 18874 - RNA, 21 nt, synthetic construct
  source 1..21: mol_type = other RNA
acgagactgcggattatcact

SEQ ID NO: 18875 - RNA, 21 nt, synthetic construct
  source 1..21: mol_type = other RNA
acgcagtacaaactgctcagg

SEQ ID NO: 18876 - RNA, 21 nt, synthetic construct
  source 1..21: mol_type = other RNA
acgcttgctttcactgttgtc

SEQ ID NO: 18877 - RNA, 21 nt, synthetic construct
  source 1..21: mol_type = other RNA
acggtcagggacagaatccca

SEQ ID NO: 18878 - RNA, 21 nt, synthetic construct
  source 1..21: mol_type = other RNA
acgtattctgtaatccacaga

SEQ ID NO: 18879 - RNA, 21 nt, synthetic construct
  source 1..21: mol_type = other RNA
acgtcatatatctttgtgggg

SEQ ID NO: 18880 - RNA, 21 nt, synthetic construct
  source 1..21: mol_type = other RNA
acgtctctatgatttgggtaa

SEQ ID NO: 18881 - RNA, 21 nt, synthetic construct
  source 1..21: mol_type = other RNA
acgtgaactagggaggaataa

SEQ ID NO: 18882 - RNA, 21 nt, synthetic construct
  source 1..21: mol_type = other RNA
acgtggacattgatggttttc

SEQ ID NO: 18883 - RNA, 21 nt, synthetic construct
  source 1..21: mol_type = other RNA
actaaagacagagacagcaat

SEQ ID NO: 18884 - RNA, 21 nt, synthetic construct
  source 1..21: mol_type = other RNA
actaactggtaagaacagaaa

SEQ ID NO: 18885 - RNA, 21 nt, synthetic construct
  source 1..21: mol_type = other RNA
actacacacacaaatatgacc

SEQ ID NO: 18886 - RNA, 21 nt, synthetic construct
  source 1..21: mol_type = other RNA
actactgctttacagagaatt

SEQ ID NO: 18887 - RNA, 21 nt, synthetic construct
  source 1..21: mol_type = other RNA
actacttatcatttttggagc

SEQ ID NO: 18888 - RNA, 21 nt, synthetic construct
  source 1..21: mol_type = other RNA
actagaggagcaagtacaaca

SEQ ID NO: 18889 - RNA, 21 nt, synthetic construct
  source 1..21: mol_type = other RNA
actagctttctccctctcttg

SEQ ID NO: 18890 - RNA, 21 nt, synthetic construct
  source 1..21: mol_type = other RNA
actaggagctcaggagtacaa

SEQ ID NO: 18891 - RNA, 21 nt, synthetic construct
  source 1..21: mol_type = other RNA
actagggaggaataaaagcac

SEQ ID NO: 18892 - RNA, 21 nt, synthetic construct
  source 1..21: mol_type = other RNA
actatgacccacgcagtacaa

SEQ ID NO: 18893 - RNA, 21 nt, synthetic construct
  source 1..21: mol_type = other RNA
actatgtagctcctgtaacag

SEQ ID NO: 18894 - RNA, 21 nt, synthetic construct
  source 1..21: mol_type = other RNA
actattccttcaaaaagctca

SEQ ID NO: 18895 - RNA, 21 nt, synthetic construct
  source 1..21: mol_type = other RNA
actattctgagctttttgaag

SEQ ID NO: 18896 - RNA, 21 nt, synthetic construct
  source 1..21: mol_type = other RNA
actattttccacatactacac

SEQ ID NO: 18897 - RNA, 21 nt, synthetic construct
  source 1..21: mol_type = other RNA
actcaagatatgatgcttaga

SEQ ID NO: 18898 - RNA, 21 nt, synthetic construct
  source 1..21: mol_type = other RNA
actcaggtgatcatgctttat

SEQ ID NO: 18899 - RNA, 21 nt, synthetic construct
  source 1..21: mol_type = other RNA
actcatacttgatcccatttt

SEQ ID NO: 18900 - RNA, 21 nt, synthetic construct
  source 1..21: mol_type = other RNA
actcattaacgcttgctttca

SEQ ID NO: 18901 - RNA, 21 nt, synthetic construct
  source 1..21: mol_type = other RNA
actccattactggcttgtact

SEQ ID NO: 18902 - RNA, 21 nt, synthetic construct
  source 1..21: mol_type = other RNA
actccatttacttaaagttgg

SEQ ID NO: 18903 - RNA, 21 nt, synthetic construct
  source 1..21: mol_type = other RNA
actcctaaaactttaagaaag

SEQ ID NO: 18904 - RNA, 21 nt, synthetic construct
  source 1..21: mol_type = other RNA
actcctgagcagtttgtactg

SEQ ID NO: 18905 - RNA, 21 nt, synthetic construct
  source 1..21: mol_type = other RNA
actcctgagctcctagtatac

SEQ ID NO: 18906 - RNA, 21 nt, synthetic construct
  source 1..21: mol_type = other RNA
actctcactcatacttgatcc

SEQ ID NO: 18907 - RNA, 21 nt, synthetic construct
  source 1..21: mol_type = other RNA
actctgatgtctagccaactt

SEQ ID NO: 18908 - RNA, 21 nt, synthetic construct
  source 1..21: mol_type = other RNA
actcttacccagcagtgcttt

SEQ ID NO: 18909 - RNA, 21 nt, synthetic construct
  source 1..21: mol_type = other RNA
actgagcagtaaggaaataaa

SEQ ID NO: 18910 - RNA, 21 nt, synthetic construct
  source 1..21: mol_type = other RNA
actgatctcagatgcctgtgt

SEQ ID NO: 18911 - RNA, 21 nt, synthetic construct
  source 1..21: mol_type = other RNA
actgcaagaactgtcttgggc

SEQ ID NO: 18912 - RNA, 21 nt, synthetic construct
  source 1..21: mol_type = other RNA
actgcaattcattccatgtga

SEQ ID NO: 18913 - RNA, 21 nt, synthetic construct
  source 1..21: mol_type = other RNA
actgcccttttaaaaaagcag

SEQ ID NO: 18914 - RNA, 21 nt, synthetic construct
  source 1..21: mol_type = other RNA
actgcggattatcactactta

SEQ ID NO: 18915 - RNA, 21 nt, synthetic construct
  source 1..21: mol_type = other RNA
actgcgtgggtcatagtaatt

SEQ ID NO: 18916 - RNA, 21 nt, synthetic construct
  source 1..21: mol_type = other RNA
actgctcaggagtcagaagaa

SEQ ID NO: 18917 - RNA, 21 nt, synthetic construct
  source 1..21: mol_type = other RNA
actgctcagtaaaaagagaaa

SEQ ID NO: 18918 - RNA, 21 nt, synthetic construct
  source 1..21: mol_type = other RNA
actgctgggtaagagtcaagc

SEQ ID NO: 18919 - RNA, 21 nt, synthetic construct
  source 1..21: mol_type = other RNA
actgctttacagagaattgga

SEQ ID NO: 18920 - RNA, 21 nt, synthetic construct
  source 1..21: mol_type = other RNA
actgcttttttaaaagggcag

SEQ ID NO: 18921 - RNA, 21 nt, synthetic construct
  source 1..21: mol_type = other RNA
actggcttgtactgtttacag

SEQ ID NO: 18922 - RNA, 21 nt, synthetic construct
  source 1..21: mol_type = other RNA
actggtaagaacagaaatgag

SEQ ID NO: 18923 - RNA, 21 nt, synthetic construct
  source 1..21: mol_type = other RNA
actggtttctcaagcaaaagc

SEQ ID NO: 18924 - RNA, 21 nt, synthetic construct
  source 1..21: mol_type = other RNA
actgtattagcaatataaaaa

SEQ ID NO: 18925 - RNA, 21 nt, synthetic construct
  source 1..21: mol_type = other RNA
actgtccacagttgcaattca

SEQ ID NO: 18926 - RNA, 21 nt, synthetic construct
  source 1..21: mol_type = other RNA
actgtcttgggccacatataa

SEQ ID NO: 18927 - RNA, 21 nt, synthetic construct
  source 1..21: mol_type = other RNA
actgtgaagacggtcagggac

SEQ ID NO: 18928 - RNA, 21 nt, synthetic construct
  source 1..21: mol_type = other RNA
actgtggacagtatagctgta

SEQ ID NO: 18929 - RNA, 21 nt, synthetic construct
  source 1..21: mol_type = other RNA
actgttacaggagctacatag

SEQ ID NO: 18930 - RNA, 21 nt, synthetic construct
  source 1..21: mol_type = other RNA
actgttgtccaaggcaggcac

SEQ ID NO: 18931 - RNA, 21 nt, synthetic construct
  source 1..21: mol_type = other RNA
actgtttacagcaagttgtct

SEQ ID NO: 18932 - RNA, 21 nt, synthetic construct
  source 1..21: mol_type = other RNA
acttaaagttggctagacatc

SEQ ID NO: 18933 - RNA, 21 nt, synthetic construct
  source 1..21: mol_type = other RNA
acttactttgtgattgttttc

SEQ ID NO: 18934 - RNA, 21 nt, synthetic construct
  source 1..21: mol_type = other RNA
acttatcatttttggagcatt

SEQ ID NO: 18935 - RNA, 21 nt, synthetic construct
  source 1..21: mol_type = other RNA
acttcaggagagaggtcatat

SEQ ID NO: 18936 - RNA, 21 nt, synthetic construct
  source 1..21: mol_type = other RNA
acttcctggaaacacttgatt

SEQ ID NO: 18937 - RNA, 21 nt, synthetic construct
  source 1..21: mol_type = other RNA
acttgaatgaagaataggtct

SEQ ID NO: 18938 - RNA, 21 nt, synthetic construct
  source 1..21: mol_type = other RNA
acttgatcccattttccattt

SEQ ID NO: 18939 - RNA, 21 nt, synthetic construct
  source 1..21: mol_type = other RNA
acttgattggaggagctctaa

SEQ ID NO: 18940 - RNA, 21 nt, synthetic construct
  source 1..21: mol_type = other RNA
acttgctcctctagtattcag

SEQ ID NO: 18941 - RNA, 21 nt, synthetic construct
  source 1..21: mol_type = other RNA
acttgctgtaaacagtacaag

SEQ ID NO: 18942 - RNA, 21 nt, synthetic construct
  source 1..21: mol_type = other RNA
acttgtaggacagaaatttag

SEQ ID NO: 18943 - RNA, 21 nt, synthetic construct
  source 1..21: mol_type = other RNA
acttgttctgtggattacaga

SEQ ID NO: 18944 - RNA, 21 nt, synthetic construct
  source 1..21: mol_type = other RNA
actttaagtaaatggagtgag

SEQ ID NO: 18945 - RNA, 21 nt, synthetic construct
  source 1..21: mol_type = other RNA
actttcctcaatttaacagct

SEQ ID NO: 18946 - RNA, 21 nt, synthetic construct
  source 1..21: mol_type = other RNA
actttggtggtgcagcaaggg

SEQ ID NO: 18947 - RNA, 21 nt, synthetic construct
  source 1..21: mol_type = other RNA
actttgtgattgttttctata

SEQ ID NO: 18948 - RNA, 21 nt, synthetic construct
  source 1..21: mol_type = other RNA
agaaaaagggagatgttgcct

SEQ ID NO: 18949 - RNA, 21 nt, synthetic construct
  source 1..21: mol_type = other RNA
agaaaaatgctccaaaaatga

SEQ ID NO: 18950 - RNA, 21 nt, synthetic construct
  source 1..21: mol_type = other RNA
agaaaaattttagcttttgct

SEQ ID NO: 18951 - RNA, 21 nt, synthetic construct
  source 1..21: mol_type = other RNA
agaaaacaatcacaaagtaag

SEQ ID NO: 18952 - RNA, 21 nt, synthetic construct
  source 1..21: mol_type = other RNA
agaaaaccatcaatgtccacg

SEQ ID NO: 18953 - RNA, 21 nt, synthetic construct
  source 1..21: mol_type = other RNA
agaaaactgcttttttaaaag

SEQ ID NO: 18954 - RNA, 21 nt, synthetic construct
  source 1..21: mol_type = other RNA
agaaaccagtgcttccctccc

SEQ ID NO: 18955 - RNA, 21 nt, synthetic construct
  source 1..21: mol_type = other RNA
agaaagctagtgctatgtctg

SEQ ID NO: 18956 - RNA, 21 nt, synthetic construct
  source 1..21: mol_type = other RNA
agaaatgagaggtatttagag

SEQ ID NO: 18957 - RNA, 21 nt, synthetic construct
  source 1..21: mol_type = other RNA
agaaatttaggctgggttcat

SEQ ID NO: 18958 - RNA, 21 nt, synthetic construct
  source 1..21: mol_type = other RNA
agaacaacagaccatggaagg

SEQ ID NO: 18959 - RNA, 21 nt, synthetic construct
  source 1..21: mol_type = other RNA
agaacaagtccggggctacag

SEQ ID NO: 18960 - RNA, 21 nt, synthetic construct
  source 1..21: mol_type = other RNA
agaacagaaatgagaggtatt

SEQ ID NO: 18961 - RNA, 21 nt, synthetic construct
  source 1..21: mol_type = other RNA
agaacagaattcatcctgtaa

SEQ ID NO: 18962 - RNA, 21 nt, synthetic construct
  source 1..21: mol_type = other RNA
agaaccaccccacaaagatat

SEQ ID NO: 18963 - RNA, 21 nt, synthetic construct
  source 1..21: mol_type = other RNA
agaacgtgaactagggaggaa

SEQ ID NO: 18964 - RNA, 21 nt, synthetic construct
  source 1..21: mol_type = other RNA
agaactgtcttgggccacata

SEQ ID NO: 18965 - RNA, 21 nt, synthetic construct
  source 1..21: mol_type = other RNA
agaacttgaatgaagaatagg

SEQ ID NO: 18966 - RNA, 21 nt, synthetic construct
  source 1..21: mol_type = other RNA
agaagaaaactgcttttttaa

SEQ ID NO: 18967 - RNA, 21 nt, synthetic construct
  source 1..21: mol_type = other RNA
agaatacgtggacattgatgg

SEQ ID NO: 18968 - RNA, 21 nt, synthetic construct
  source 1..21: mol_type = other RNA
agaataggtctgtgtgataca

SEQ ID NO: 18969 - RNA, 21 nt, synthetic construct
  source 1..21: mol_type = other RNA
agaatcccagctaaggaaaaa

SEQ ID NO: 18970 - RNA, 21 nt, synthetic construct
  source 1..21: mol_type = other RNA
agaattactatgacccacgca

SEQ ID NO: 18971 - RNA, 21 nt, synthetic construct
  source 1..21: mol_type = other RNA
agaattcatcctgtaaaccag

SEQ ID NO: 18972 - RNA, 21 nt, synthetic construct
  source 1..21: mol_type = other RNA
agaattggatctgaggttagg

SEQ ID NO: 18973 - RNA, 21 nt, synthetic construct
  source 1..21: mol_type = other RNA
agacaacttgctgtaaacagt

SEQ ID NO: 18974 - RNA, 21 nt, synthetic construct
  source 1..21: mol_type = other RNA
agacaccaggctacccaagat

SEQ ID NO: 18975 - RNA, 21 nt, synthetic construct
  source 1..21: mol_type = other RNA
agacactattccttcaaaaag

SEQ ID NO: 18976 - RNA, 21 nt, synthetic construct
  source 1..21: mol_type = other RNA
agacagacataaagcatgatc

SEQ ID NO: 18977 - RNA, 21 nt, synthetic construct
  source 1..21: mol_type = other RNA
agacagagacagcaatttgga

SEQ ID NO: 18978 - RNA, 21 nt, synthetic construct
  source 1..21: mol_type = other RNA
agacagattggttccaccaca

SEQ ID NO: 18979 - RNA, 21 nt, synthetic construct
  source 1..21: mol_type = other RNA
agacagcaatttggaagctat

SEQ ID NO: 18980 - RNA, 21 nt, synthetic construct
  source 1..21: mol_type = other RNA
agacagttcttgcagtgtggc

SEQ ID NO: 18981 - RNA, 21 nt, synthetic construct
  source 1..21: mol_type = other RNA
agacataaagcatgatcacct

SEQ ID NO: 18982 - RNA, 21 nt, synthetic construct
  source 1..21: mol_type = other RNA
agacatagcactagctttctc

SEQ ID NO: 18983 - RNA, 21 nt, synthetic construct
  source 1..21: mol_type = other RNA
agacatcagagtatactagga

SEQ ID NO: 18984 - RNA, 21 nt, synthetic construct
  source 1..21: mol_type = other RNA
agacatttacatgtcgctcac

SEQ ID NO: 18985 - RNA, 21 nt, synthetic construct
  source 1..21: mol_type = other RNA
agaccatggaaggcatgacca

SEQ ID NO: 18986 - RNA, 21 nt, synthetic construct
  source 1..21: mol_type = other RNA
agacccttgctgcaccaccaa

SEQ ID NO: 18987 - RNA, 21 nt, synthetic construct
  source 1..21: mol_type = other RNA
agacctattcttcattcaagt

SEQ ID NO: 18988 - RNA, 21 nt, synthetic construct
  source 1..21: mol_type = other RNA
agacggtcagggacagaatcc

SEQ ID NO: 18989 - RNA, 21 nt, synthetic construct
  source 1..21: mol_type = other RNA
agacgtcatatatctttgtgg

SEQ ID NO: 18990 - RNA, 21 nt, synthetic construct
  source 1..21: mol_type = other RNA
agactgcggattatcactact

SEQ ID NO: 18991 - RNA, 21 nt, synthetic construct
  source 1..21: mol_type = other RNA
agactttcctcaatttaacag

SEQ ID NO: 18992 - RNA, 21 nt, synthetic construct
  source 1..21: mol_type = other RNA
agagaaaaccatcaatgtcca

SEQ ID NO: 18993 - RNA, 21 nt, synthetic construct
  source 1..21: mol_type = other RNA
agagaattggatctgaggtta

SEQ ID NO: 18994 - RNA, 21 nt, synthetic construct
  source 1..21: mol_type = other RNA
agagacagacataaagcatga

SEQ ID NO: 18995 - RNA, 21 nt, synthetic construct
  source 1..21: mol_type = other RNA
agagacagcaatttggaagct

SEQ ID NO: 18996 - RNA, 21 nt, synthetic construct
  source 1..21: mol_type = other RNA
agagacgtcatatatctttgt

SEQ ID NO: 18997 - RNA, 21 nt, synthetic construct
  source 1..21: mol_type = other RNA
agagagcctggggagagaggg

SEQ ID NO: 18998 - RNA, 21 nt, synthetic construct
  source 1..21: mol_type = other RNA
agagagcttcagcttttattt

SEQ ID NO: 18999 - RNA, 21 nt, synthetic construct
  source 1..21: mol_type = other RNA
agagagggagaaagctagtgc

SEQ ID NO: 19000 - RNA, 21 nt, synthetic construct
  source 1..21: mol_type = other RNA
agagagggtgagggagggaag

SEQ ID NO: 19001 - RNA, 21 nt, synthetic construct
  source 1..21: mol_type = other RNA
agagaggtcatatttgtgtgt

SEQ ID NO: 19002 - RNA, 21 nt, synthetic construct
  source 1..21: mol_type = other RNA
agagcatgaaaatgacaggtg

SEQ ID NO: 19003 - RNA, 21 nt, synthetic construct
  source 1..21: mol_type = other RNA
agagcctggggagagagggtg

SEQ ID NO: 19004 - RNA, 21 nt, synthetic construct
  source 1..21: mol_type = other RNA
agagctcctccaatcaagtgt

SEQ ID NO: 19005 - RNA, 21 nt, synthetic construct
  source 1..21: mol_type = other RNA
agagcttcagcttttatttcc

SEQ ID NO: 19006 - RNA, 21 nt, synthetic construct
  source 1..21: mol_type = other RNA
agaggaagaaaaagggagatg

SEQ ID NO: 19007 - RNA, 21 nt, synthetic construct
  source 1..21: mol_type = other RNA
agaggagcaagtacaacaaat

SEQ ID NO: 19008 - RNA, 21 nt, synthetic construct
  source 1..21: mol_type = other RNA
agagggagaaagctagtgcta

SEQ ID NO: 19009 - RNA, 21 nt, synthetic construct
  source 1..21: mol_type = other RNA
agagggtgagggagggaagca

SEQ ID NO: 19010 - RNA, 21 nt, synthetic construct
  source 1..21: mol_type = other RNA
agaggtatttagaggaagaaa

SEQ ID NO: 19011 - RNA, 21 nt, synthetic construct
  source 1..21: mol_type = other RNA
agaggtcatatttgtgtgtgt

SEQ ID NO: 19012 - RNA, 21 nt, synthetic construct
  source 1..21: mol_type = other RNA
agagtatactaggagctcagg

SEQ ID NO: 19013 - RNA, 21 nt, synthetic construct
  source 1..21: mol_type = other RNA
agagtcaagccccagctcaag

SEQ ID NO: 19014 - RNA, 21 nt, synthetic construct
  source 1..21: mol_type = other RNA
agagttgctaagatgcctggt

SEQ ID NO: 19015 - RNA, 21 nt, synthetic construct
  source 1..21: mol_type = other RNA
agataaacatttaagaacgtg

SEQ ID NO: 19016 - RNA, 21 nt, synthetic construct
  source 1..21: mol_type = other RNA
agataacactaaagacagaga

SEQ ID NO: 19017 - RNA, 21 nt, synthetic construct
  source 1..21: mol_type = other RNA
agatagagcatgaaaatgaca

SEQ ID NO: 19018 - RNA, 21 nt, synthetic construct
  source 1..21: mol_type = other RNA
agatatatgacgtctctatga

SEQ ID NO: 19019 - RNA, 21 nt, synthetic construct
  source 1..21: mol_type = other RNA
agatatgatgcttagagctcc

SEQ ID NO: 19020 - RNA, 21 nt, synthetic construct
  source 1..21: mol_type = other RNA
agatcaagagagggagaaagc

SEQ ID NO: 19021 - RNA, 21 nt, synthetic construct
  source 1..21: mol_type = other RNA
agatcacctggactgtgaaga

SEQ ID NO: 19022 - RNA, 21 nt, synthetic construct
  source 1..21: mol_type = other RNA
agatcagttactaactggtaa

SEQ ID NO: 19023 - RNA, 21 nt, synthetic construct
  source 1..21: mol_type = other RNA
agatccaattctctgtaaagc

SEQ ID NO: 19024 - RNA, 21 nt, synthetic construct
  source 1..21: mol_type = other RNA
agatgacatttgaatctgcag

SEQ ID NO: 19025 - RNA, 21 nt, synthetic construct
  source 1..21: mol_type = other RNA
agatgcctggtagggatgcaa

SEQ ID NO: 19026 - RNA, 21 nt, synthetic construct
  source 1..21: mol_type = other RNA
agatgcctgtgtgatagcttc

SEQ ID NO: 19027 - RNA, 21 nt, synthetic construct
  source 1..21: mol_type = other RNA
agatggatcaaaagataacac

SEQ ID NO: 19028 - RNA, 21 nt, synthetic construct
  source 1..21: mol_type = other RNA
agatgtaagatggatcaaaag

SEQ ID NO: 19029 - RNA, 21 nt, synthetic construct
  source 1..21: mol_type = other RNA
agatgtgcctgccttggacaa

SEQ ID NO: 19030 - RNA, 21 nt, synthetic construct
  source 1..21: mol_type = other RNA
agatgttgcctaacctcagat

SEQ ID NO: 19031 - RNA, 21 nt, synthetic construct
  source 1..21: mol_type = other RNA
agattcaaatgtcatctcccc

SEQ ID NO: 19032 - RNA, 21 nt, synthetic construct
  source 1..21: mol_type = other RNA
agattccattaaactgttaca

SEQ ID NO: 19033 - RNA, 21 nt, synthetic construct
  source 1..21: mol_type = other RNA
agattggacacccctggttta

SEQ ID NO: 19034 - RNA, 21 nt, synthetic construct
  source 1..21: mol_type = other RNA
agattggttccaccacaaatt

SEQ ID NO: 19035 - RNA, 21 nt, synthetic construct
  source 1..21: mol_type = other RNA
agatttaacctgatgctacac

SEQ ID NO: 19036 - RNA, 21 nt, synthetic construct
  source 1..21: mol_type = other RNA
agcaactctcactcatacttg

SEQ ID NO: 19037 - RNA, 21 nt, synthetic construct
  source 1..21: mol_type = other RNA
agcaagcgttaatgagtttgg

SEQ ID NO: 19038 - RNA, 21 nt, synthetic construct
  source 1..21: mol_type = other RNA
agcaagggtagcattccaaaa

SEQ ID NO: 19039 - RNA, 21 nt, synthetic construct
  source 1..21: mol_type = other RNA
agcaagggtctcaaatggtat

SEQ ID NO: 19040 - RNA, 21 nt, synthetic construct
  source 1..21: mol_type = other RNA
agcaagtacaacaaatggaaa

SEQ ID NO: 19041 - RNA, 21 nt, synthetic construct
  source 1..21: mol_type = other RNA
agcaagttgtctaacccgcgg

SEQ ID NO: 19042 - RNA, 21 nt, synthetic construct
  source 1..21: mol_type = other RNA
agcaatgacaacaaccccaga

SEQ ID NO: 19043 - RNA, 21 nt, synthetic construct
  source 1..21: mol_type = other RNA
agcaatttggaagctatcaca

SEQ ID NO: 19044 - RNA, 21 nt, synthetic construct
  source 1..21: mol_type = other RNA
agcactagctttctccctctc

SEQ ID NO: 19045 - RNA, 21 nt, synthetic construct
  source 1..21: mol_type = other RNA
agcactgctgggtaagagtca

SEQ ID NO: 19046 - RNA, 21 nt, synthetic construct
  source 1..21: mol_type = other RNA
agcactggtttctcaagcaaa

SEQ ID NO: 19047 - RNA, 21 nt, synthetic construct
  source 1..21: mol_type = other RNA
agcagcaagggtagcattcca

SEQ ID NO: 19048 - RNA, 21 nt, synthetic construct
  source 1..21: mol_type = other RNA
agcagtaaggaaataaaagct

SEQ ID NO: 19049 - RNA, 21 nt, synthetic construct
  source 1..21: mol_type = other RNA
agcagtagtcaagatcacctg

SEQ ID NO: 19050 - RNA, 21 nt, synthetic construct
  source 1..21: mol_type = other RNA
agcagtgcttttattcctccc

SEQ ID NO: 19051 - RNA, 21 nt, synthetic construct
  source 1..21: mol_type = other RNA
agcagttaaatgaaatgtaat

SEQ ID NO: 19052 - RNA, 21 nt, synthetic construct
  source 1..21: mol_type = other RNA
agcagtttgtactgcgtgggt

SEQ ID NO: 19053 - RNA, 21 nt, synthetic construct
  source 1..21: mol_type = other RNA
agcagttttcttctgactcct

SEQ ID NO: 19054 - RNA, 21 nt, synthetic construct
  source 1..21: mol_type = other RNA
agcatcatatcttgagttata

SEQ ID NO: 19055 - RNA, 21 nt, synthetic construct
  source 1..21: mol_type = other RNA
agcatgaaaatgacaggtgaa

SEQ ID NO: 19056 - RNA, 21 nt, synthetic construct
  source 1..21: mol_type = other RNA
agcatgatcacctgagtttta

SEQ ID NO: 19057 - RNA, 21 nt, synthetic construct
  source 1..21: mol_type = other RNA
agcattccaaaaagaaccacc

SEQ ID NO: 19058 - RNA, 21 nt, synthetic construct
  source 1..21: mol_type = other RNA
agcattggaaaagtggctggt

SEQ ID NO: 19059 - RNA, 21 nt, synthetic construct
  source 1..21: mol_type = other RNA
agcatttggtgttaaaatgtt

SEQ ID NO: 19060 - RNA, 21 nt, synthetic construct
  source 1..21: mol_type = other RNA
agcatttttctagagacagac

SEQ ID NO: 19061 - RNA, 21 nt, synthetic construct
  source 1..21: mol_type = other RNA
agccaactttaagtaaatgga

SEQ ID NO: 19062 - RNA, 21 nt, synthetic construct
  source 1..21: mol_type = other RNA
agccacttttccaatgctcaa

SEQ ID NO: 19063 - RNA, 21 nt, synthetic construct
  source 1..21: mol_type = other RNA
agccagtaatggagtttcacc

SEQ ID NO: 19064 - RNA, 21 nt, synthetic construct
  source 1..21: mol_type = other RNA
agccccagctcaagccttaat

SEQ ID NO: 19065 - RNA, 21 nt, synthetic construct
  source 1..21: mol_type = other RNA
agccccggacttgttctgtgg

SEQ ID NO: 19066 - RNA, 21 nt, synthetic construct
  source 1..21: mol_type = other RNA
agccgaaagattggacacccc

SEQ ID NO: 19067 - RNA, 21 nt, synthetic construct
  source 1..21: mol_type = other RNA
agcctaaatttctgtcctaca

SEQ ID NO: 19068 - RNA, 21 nt, synthetic construct
  source 1..21: mol_type = other RNA
agcctggggagagagggtgag

SEQ ID NO: 19069 - RNA, 21 nt, synthetic construct
  source 1..21: mol_type = other RNA
agcctggtgtctcgcgaaacc

SEQ ID NO: 19070 - RNA, 21 nt, synthetic construct
  source 1..21: mol_type = other RNA
agccttaatttgtggtggaac

SEQ ID NO: 19071 - RNA, 21 nt, synthetic construct
  source 1..21: mol_type = other RNA
agcgacatgtaaatgtcttta

SEQ ID NO: 19072 - RNA, 21 nt, synthetic construct
  source 1..21: mol_type = other RNA
agctaaggaaaaaggataaaa

SEQ ID NO: 19073 - RNA, 21 nt, synthetic construct
  source 1..21: mol_type = other RNA
agctaagtccaacaaaccatt

SEQ ID NO: 19074 - RNA, 21 nt, synthetic construct
  source 1..21: mol_type = other RNA
agctacatagttaaatatatc

SEQ ID NO: 19075 - RNA, 21 nt, synthetic construct
  source 1..21: mol_type = other RNA
agctagtgctatgtctgaata

SEQ ID NO: 19076 - RNA, 21 nt, synthetic construct
  source 1..21: mol_type = other RNA
agctatactgtccacagttgc

SEQ ID NO: 19077 - RNA, 21 nt, synthetic construct
  source 1..21: mol_type = other RNA
agctatcacacaggcatctga

SEQ ID NO: 19078 - RNA, 21 nt, synthetic construct
  source 1..21: mol_type = other RNA
agctcaagccttaatttgtgg

SEQ ID NO: 19079 - RNA, 21 nt, synthetic construct
  source 1..21: mol_type = other RNA
agctcagaatagttaaggtaa

SEQ ID NO: 19080 - RNA, 21 nt, synthetic construct
  source 1..21: mol_type = other RNA
agctcaggagtacaagacact

SEQ ID NO: 19081 - RNA, 21 nt, synthetic construct
  source 1..21: mol_type = other RNA
agctcctagtatactctgatg

SEQ ID NO: 19082 - RNA, 21 nt, synthetic construct
  source 1..21: mol_type = other RNA
agctcctccaatcaagtgttt

SEQ ID NO: 19083 - RNA, 21 nt, synthetic construct
  source 1..21: mol_type = other RNA
agctcctgtaacagtttaatg

SEQ ID NO: 19084 - RNA, 21 nt, synthetic construct
  source 1..21: mol_type = other RNA
agctctaagcatcatatcttg

SEQ ID NO: 19085 - RNA, 21 nt, synthetic construct
  source 1..21: mol_type = other RNA
agctctctggcccattacatt

SEQ ID NO: 19086 - RNA, 21 nt, synthetic construct
  source 1..21: mol_type = other RNA
agctgaaagctaagtccaaca

SEQ ID NO: 19087 - RNA, 21 nt, synthetic construct
  source 1..21: mol_type = other RNA
agctgaagctctctggcccat

SEQ ID NO: 19088 - RNA, 21 nt, synthetic construct
  source 1..21: mol_type = other RNA
agctgggattctgtccctgac

SEQ ID NO: 19089 - RNA, 21 nt, synthetic construct
  source 1..21: mol_type = other RNA
agctggggcttgactcttacc

SEQ ID NO: 19090 - RNA, 21 nt, synthetic construct
  source 1..21: mol_type = other RNA
agctgtagccccggacttgtt

SEQ ID NO: 19091 - RNA, 21 nt, synthetic construct
  source 1..21: mol_type = other RNA
agctgtcctgggtcccatgcg

SEQ ID NO: 19092 - RNA, 21 nt, synthetic construct
  source 1..21: mol_type = other RNA
agctgtcctttatatgtggcc

SEQ ID NO: 19093 - RNA, 21 nt, synthetic construct
  source 1..21: mol_type = other RNA
agctgttaaattgaggaaagt

SEQ ID NO: 19094 - RNA, 21 nt, synthetic construct
  source 1..21: mol_type = other RNA
agcttcagcttttatttcctt

SEQ ID NO: 19095 - RNA, 21 nt, synthetic construct
  source 1..21: mol_type = other RNA
agcttccaaattgctgtctct

SEQ ID NO: 19096 - RNA, 21 nt, synthetic construct
  source 1..21: mol_type = other RNA
agctttctccctctcttgatc

SEQ ID NO: 19097 - RNA, 21 nt, synthetic construct
  source 1..21: mol_type = other RNA
agcttttatttccttactgct

SEQ ID NO: 19098 - RNA, 21 nt, synthetic construct
  source 1..21: mol_type = other RNA
agcttttgcttgagaaaccag

SEQ ID NO: 19099 - RNA, 21 nt, synthetic construct
  source 1..21: mol_type = other RNA
agctttttcatttttcactat

SEQ ID NO: 19100 - RNA, 21 nt, synthetic construct
  source 1..21: mol_type = other RNA
agctttttgaaggaatagtgt

SEQ ID NO: 19101 - RNA, 21 nt, synthetic construct
  source 1..21: mol_type = other RNA
aggaaagtctatccagggacc

SEQ ID NO: 19102 - RNA, 21 nt, synthetic construct
  source 1..21: mol_type = other RNA
aggaaataaaagctgaagctc

SEQ ID NO: 19103 - RNA, 21 nt, synthetic construct
  source 1..21: mol_type = other RNA
aggaagaaaaagggagatgtt

SEQ ID NO: 19104 - RNA, 21 nt, synthetic construct
  source 1..21: mol_type = other RNA
aggaagatagagcatgaaaat

SEQ ID NO: 19105 - RNA, 21 nt, synthetic construct
  source 1..21: mol_type = other RNA
aggaagtgaaaacttgtagga

SEQ ID NO: 19106 - RNA, 21 nt, synthetic construct
  source 1..21: mol_type = other RNA
aggaataaaagcactgctggg

SEQ ID NO: 19107 - RNA, 21 nt, synthetic construct
  source 1..21: mol_type = other RNA
aggaatagtgtcttgtactcc

SEQ ID NO: 19108 - RNA, 21 nt, synthetic construct
  source 1..21: mol_type = other RNA
aggaattataataccaacatt

SEQ ID NO: 19109 - RNA, 21 nt, synthetic construct
  source 1..21: mol_type = other RNA
aggacaatcatcctaacaaga

SEQ ID NO: 19110 - RNA, 21 nt, synthetic construct
  source 1..21: mol_type = other RNA
aggacagaaatttaggctggg

SEQ ID NO: 19111 - RNA, 21 nt, synthetic construct
  source 1..21: mol_type = other RNA
aggagagaggtcatatttgtg

SEQ ID NO: 19112 - RNA, 21 nt, synthetic construct
  source 1..21: mol_type = other RNA
aggagcaagtacaacaaatgg

SEQ ID NO: 19113 - RNA, 21 nt, synthetic construct
  source 1..21: mol_type = other RNA
aggagctacatagttaaatat

SEQ ID NO: 19114 - RNA, 21 nt, synthetic construct
  source 1..21: mol_type = other RNA
aggagctcaggagtacaagac

SEQ ID NO: 19115 - RNA, 21 nt, synthetic construct
  source 1..21: mol_type = other RNA
aggagctctaagcatcatatc

SEQ ID NO: 19116 - RNA, 21 nt, synthetic construct
  source 1..21: mol_type = other RNA
aggagtacaagacactattcc

SEQ ID NO: 19117 - RNA, 21 nt, synthetic construct
  source 1..21: mol_type = other RNA
aggagtcagaagaaaactgct

SEQ ID NO: 19118 - RNA, 21 nt, synthetic construct
  source 1..21: mol_type = other RNA
aggataaaacttactttgtga

SEQ ID NO: 19119 - RNA, 21 nt, synthetic construct
  source 1..21: mol_type = other RNA
aggatgaattctgttctcgtg

SEQ ID NO: 19120 - RNA, 21 nt, synthetic construct
  source 1..21: mol_type = other RNA
aggatgattgtcctaaaggaa

SEQ ID NO: 19121 - RNA, 21 nt, synthetic construct
  source 1..21: mol_type = other RNA
aggattaaaagcagcaagggt

SEQ ID NO: 19122 - RNA, 21 nt, synthetic construct
  source 1..21: mol_type = other RNA
aggcaacatctccctttttct

SEQ ID NO: 19123 - RNA, 21 nt, synthetic construct
  source 1..21: mol_type = other RNA
aggcacatctttaaaaatggt

SEQ ID NO: 19124 - RNA, 21 nt, synthetic construct
  source 1..21: mol_type = other RNA
aggcaggcacatctttaaaaa

SEQ ID NO: 19125 - RNA, 21 nt, synthetic construct
  source 1..21: mol_type = other RNA
aggcatctgagatcagttact

SEQ ID NO: 19126 - RNA, 21 nt, synthetic construct
  source 1..21: mol_type = other RNA
aggcatcttagcaactctcac

SEQ ID NO: 19127 - RNA, 21 nt, synthetic construct
  source 1..21: mol_type = other RNA
aggcatgaccaaaggggagat

SEQ ID NO: 19128 - RNA, 21 nt, synthetic construct
  source 1..21: mol_type = other RNA
aggctacccaagatcaagaga

SEQ ID NO: 19129 - RNA, 21 nt, synthetic construct
  source 1..21: mol_type = other RNA
aggctctctacccctttgcat

SEQ ID NO: 19130 - RNA, 21 nt, synthetic construct
  source 1..21: mol_type = other RNA
aggctgggttcatttgtatca

SEQ ID NO: 19131 - RNA, 21 nt, synthetic construct
  source 1..21: mol_type = other RNA
aggcttgagctggggcttgac

SEQ ID NO: 19132 - RNA, 21 nt, synthetic construct
  source 1..21: mol_type = other RNA
agggaagcactggtttctcaa

SEQ ID NO: 19133 - RNA, 21 nt, synthetic construct
  source 1..21: mol_type = other RNA
agggacagaatcccagctaag

SEQ ID NO: 19134 - RNA, 21 nt, synthetic construct
  source 1..21: mol_type = other RNA
agggaccttatgcatcacatt

SEQ ID NO: 19135 - RNA, 21 nt, synthetic construct
  source 1..21: mol_type = other RNA
agggagaaagctagtgctatg

SEQ ID NO: 19136 - RNA, 21 nt, synthetic construct
  source 1..21: mol_type = other RNA
agggagatgttgcctaacctc

SEQ ID NO: 19137 - RNA, 21 nt, synthetic construct
  source 1..21: mol_type = other RNA
agggaggaataaaagcactgc

SEQ ID NO: 19138 - RNA, 21 nt, synthetic construct
  source 1..21: mol_type = other RNA
agggagggaagcactggtttc

SEQ ID NO: 19139 - RNA, 21 nt, synthetic construct
  source 1..21: mol_type = other RNA
agggaggtgagattccattaa

SEQ ID NO: 19140 - RNA, 21 nt, synthetic construct
  source 1..21: mol_type = other RNA
agggatgcaaaggggtagaga

SEQ ID NO: 19141 - RNA, 21 nt, synthetic construct
  source 1..21: mol_type = other RNA
agggcagtttgggtcatagaa

SEQ ID NO: 19142 - RNA, 21 nt, synthetic construct
  source 1..21: mol_type = other RNA
aggggagatgacatttgaatc

SEQ ID NO: 19143 - RNA, 21 nt, synthetic construct
  source 1..21: mol_type = other RNA
aggggtagagagcctggggag

SEQ ID NO: 19144 - RNA, 21 nt, synthetic construct
  source 1..21: mol_type = other RNA
agggtagcattccaaaaagaa

SEQ ID NO: 19145 - RNA, 21 nt, synthetic construct
  source 1..21: mol_type = other RNA
agggtctcaaatggtataaaa

SEQ ID NO: 19146 - RNA, 21 nt, synthetic construct
  source 1..21: mol_type = other RNA
agggtgagggagggaagcact

SEQ ID NO: 19147 - RNA, 21 nt, synthetic construct
  source 1..21: mol_type = other RNA
aggtaatttaaatcagcaatg

SEQ ID NO: 19148 - RNA, 21 nt, synthetic construct
  source 1..21: mol_type = other RNA
aggtatttagaggaagaaaaa

SEQ ID NO: 19149 - RNA, 21 nt, synthetic construct
  source 1..21: mol_type = other RNA
aggtcatatttgtgtgtgtag

SEQ ID NO: 19150 - RNA, 21 nt, synthetic construct
  source 1..21: mol_type = other RNA
aggtccctggatagactttcc

SEQ ID NO: 19151 - RNA, 21 nt, synthetic construct
  source 1..21: mol_type = other RNA
aggtctgtgtgatacaaatga

SEQ ID NO: 19152 - RNA, 21 nt, synthetic construct
  source 1..21: mol_type = other RNA
aggtgaaactccattactggc

SEQ ID NO: 19153 - RNA, 21 nt, synthetic construct
  source 1..21: mol_type = other RNA
aggtgagattccattaaactg

SEQ ID NO: 19154 - RNA, 21 nt, synthetic construct
  source 1..21: mol_type = other RNA
aggtgatcatgctttatgtct

SEQ ID NO: 19155 - RNA, 21 nt, synthetic construct
  source 1..21: mol_type = other RNA
aggtgatcttgactactgctt

SEQ ID NO: 19156 - RNA, 21 nt, synthetic construct
  source 1..21: mol_type = other RNA
aggttaggcaacatctccctt

SEQ ID NO: 19157 - RNA, 21 nt, synthetic construct
  source 1..21: mol_type = other RNA
agtaaaaagagaaaaccatca

SEQ ID NO: 19158 - RNA, 21 nt, synthetic construct
  source 1..21: mol_type = other RNA
agtaaatggagtgagcgacat

SEQ ID NO: 19159 - RNA, 21 nt, synthetic construct
  source 1..21: mol_type = other RNA
agtaactgatctcagatgcct

SEQ ID NO: 19160 - RNA, 21 nt, synthetic construct
  source 1..21: mol_type = other RNA
agtaaggaaataaaagctgaa

SEQ ID NO: 19161 - RNA, 21 nt, synthetic construct
  source 1..21: mol_type = other RNA
agtaatggagtttcacctgtc

SEQ ID NO: 19162 - RNA, 21 nt, synthetic construct
  source 1..21: mol_type = other RNA
agtaattctggggttgttgtc

SEQ ID NO: 19163 - RNA, 21 nt, synthetic construct
  source 1..21: mol_type = other RNA
agtacaaactgctcaggagtc

SEQ ID NO: 19164 - RNA, 21 nt, synthetic construct
  source 1..21: mol_type = other RNA
agtacaacaaatggaaaatgg

SEQ ID NO: 19165 - RNA, 21 nt, synthetic construct
  source 1..21: mol_type = other RNA
agtacaagacactattccttc

SEQ ID NO: 19166 - RNA, 21 nt, synthetic construct
  source 1..21: mol_type = other RNA
agtacaagccagtaatggagt

SEQ ID NO: 19167 - RNA, 21 nt, synthetic construct
  source 1..21: mol_type = other RNA
agtagtcaagatcacctggac

SEQ ID NO: 19168 - RNA, 21 nt, synthetic construct
  source 1..21: mol_type = other RNA
agtatactaggagctcaggag

SEQ ID NO: 19169 - RNA, 21 nt, synthetic construct
  source 1..21: mol_type = other RNA
agtatactctgatgtctagcc

SEQ ID NO: 19170 - RNA, 21 nt, synthetic construct
  source 1..21: mol_type = other RNA
agtatagctgtagccccggac

SEQ ID NO: 19171 - RNA, 21 nt, synthetic construct
  source 1..21: mol_type = other RNA
agtatgagtgagagttgctaa

SEQ ID NO: 19172 - RNA, 21 nt, synthetic construct
  source 1..21: mol_type = other RNA
agtattcagacatagcactag

SEQ ID NO: 19173 - RNA, 21 nt, synthetic construct
  source 1..21: mol_type = other RNA
agtcaagatcacctggactgt

SEQ ID NO: 19174 - RNA, 21 nt, synthetic construct
  source 1..21: mol_type = other RNA
agtcaagccccagctcaagcc

SEQ ID NO: 19175 - RNA, 21 nt, synthetic construct
  source 1..21: mol_type = other RNA
agtcacatggaatgaattgca

SEQ ID NO: 19176 - RNA, 21 nt, synthetic construct
  source 1..21: mol_type = other RNA
agtcagaagaaaactgctttt

SEQ ID NO: 19177 - RNA, 21 nt, synthetic construct
  source 1..21: mol_type = other RNA
agtcataccagccacttttcc

SEQ ID NO: 19178 - RNA, 21 nt, synthetic construct
  source 1..21: mol_type = other RNA
agtccaacaaaccatttttaa

SEQ ID NO: 19179 - RNA, 21 nt, synthetic construct
  source 1..21: mol_type = other RNA
agtccaggtgatcttgactac

SEQ ID NO: 19180 - RNA, 21 nt, synthetic construct
  source 1..21: mol_type = other RNA
agtccggggctacagctatac

SEQ ID NO: 19181 - RNA, 21 nt, synthetic construct
  source 1..21: mol_type = other RNA
agtctatccagggaccttatg

SEQ ID NO: 19182 - RNA, 21 nt, synthetic construct
  source 1..21: mol_type = other RNA
agtgaaaacttgtaggacaga

SEQ ID NO: 19183 - RNA, 21 nt, synthetic construct
  source 1..21: mol_type = other RNA
agtgaaagcaagcgttaatga

SEQ ID NO: 19184 - RNA, 21 nt, synthetic construct
  source 1..21: mol_type = other RNA
agtgagagttgctaagatgcc

SEQ ID NO: 19185 - RNA, 21 nt, synthetic construct
  source 1..21: mol_type = other RNA
agtgagcgacatgtaaatgtc

SEQ ID NO: 19186 - RNA, 21 nt, synthetic construct
  source 1..21: mol_type = other RNA
agtgctatgtctgaatactag

SEQ ID NO: 19187 - RNA, 21 nt, synthetic construct
  source 1..21: mol_type = other RNA
agtgcttccctccctcaccct

SEQ ID NO: 19188 - RNA, 21 nt, synthetic construct
  source 1..21: mol_type = other RNA
agtgcttttattcctccctag

SEQ ID NO: 19189 - RNA, 21 nt, synthetic construct
  source 1..21: mol_type = other RNA
agtggctggtatgactaaaga

SEQ ID NO: 19190 - RNA, 21 nt, synthetic construct
  source 1..21: mol_type = other RNA
agtgtagcatcaggttaaatc

SEQ ID NO: 19191 - RNA, 21 nt, synthetic construct
  source 1..21: mol_type = other RNA
agtgtcttgtactcctgagct

SEQ ID NO: 19192 - RNA, 21 nt, synthetic construct
  source 1..21: mol_type = other RNA
agtgttatcttttgatccatc

SEQ ID NO: 19193 - RNA, 21 nt, synthetic construct
  source 1..21: mol_type = other RNA
agtgtttccaggaagtgaaaa

SEQ ID NO: 19194 - RNA, 21 nt, synthetic construct
  source 1..21: mol_type = other RNA
agttaaatgaaatgtaatggg

SEQ ID NO: 19195 - RNA, 21 nt, synthetic construct
  source 1..21: mol_type = other RNA
agttaaggtaatttaaatcag

SEQ ID NO: 19196 - RNA, 21 nt, synthetic construct
  source 1..21: mol_type = other RNA
agttacccaaatcatagagac

SEQ ID NO: 19197 - RNA, 21 nt, synthetic construct
  source 1..21: mol_type = other RNA
agttactaactggtaagaaca

SEQ ID NO: 19198 - RNA, 21 nt, synthetic construct
  source 1..21: mol_type = other RNA
agttagtaactgatctcagat

SEQ ID NO: 19199 - RNA, 21 nt, synthetic construct
  source 1..21: mol_type = other RNA
agttcacgttcttaaatgttt

SEQ ID NO: 19200 - RNA, 21 nt, synthetic construct
  source 1..21: mol_type = other RNA
agttctgatatatttaactat

SEQ ID NO: 19201 - RNA, 21 nt, synthetic construct
  source 1..21: mol_type = other RNA
agttcttgcagtgtggcccag

SEQ ID NO: 19202 - RNA, 21 nt, synthetic construct
  source 1..21: mol_type = other RNA
agttctttagtcataccagcc

SEQ ID NO: 19203 - RNA, 21 nt, synthetic construct
  source 1..21: mol_type = other RNA
agttgctaagatgcctggtag

SEQ ID NO: 19204 - RNA, 21 nt, synthetic construct
  source 1..21: mol_type = other RNA
agttggctagacatcagagta

SEQ ID NO: 19205 - RNA, 21 nt, synthetic construct
  source 1..21: mol_type = other RNA
agttgtctaacccgcgggccg

SEQ ID NO: 19206 - RNA, 21 nt, synthetic construct
  source 1..21: mol_type = other RNA
agtttaatggaatctcacctc

SEQ ID NO: 19207 - RNA, 21 nt, synthetic construct
  source 1..21: mol_type = other RNA
agtttcacctgtcattttcat

SEQ ID NO: 19208 - RNA, 21 nt, synthetic construct
  source 1..21: mol_type = other RNA
agtttgggtcatagaacaaca

SEQ ID NO: 19209 - RNA, 21 nt, synthetic construct
  source 1..21: mol_type = other RNA
agtttgtactgcgtgggtcat

SEQ ID NO: 19210 - RNA, 21 nt, synthetic construct
  source 1..21: mol_type = other RNA
agttttataccatttgagacc

SEQ ID NO: 19211 - RNA, 21 nt, synthetic construct
  source 1..21: mol_type = other RNA
agttttatcctgaggaattat

SEQ ID NO: 19212 - RNA, 21 nt, synthetic construct
  source 1..21: mol_type = other RNA
agttttcacttcctggaaaca

SEQ ID NO: 19213 - RNA, 21 nt, synthetic construct
  source 1..21: mol_type = other RNA
agttttcttctgactcctgag

SEQ ID NO: 19214 - RNA, 21 nt, synthetic construct
  source 1..21: mol_type = other RNA
ataaaaagcatttggtgttaa

SEQ ID NO: 19215 - RNA, 21 nt, synthetic construct
  source 1..21: mol_type = other RNA
ataaaaattcagttctttagt

SEQ ID NO: 19216 - RNA, 21 nt, synthetic construct
  source 1..21: mol_type = other RNA
ataaaactcaggtgatcatgc

SEQ ID NO: 19217 - RNA, 21 nt, synthetic construct
  source 1..21: mol_type = other RNA
ataaaagcactgctgggtaag

SEQ ID NO: 19218 - RNA, 21 nt, synthetic construct
  source 1..21: mol_type = other RNA
ataaaagctgaagctctctgg

SEQ ID NO: 19219 - RNA, 21 nt, synthetic construct
  source 1..21: mol_type = other RNA
ataaacatttaagaacgtgaa

SEQ ID NO: 19220 - RNA, 21 nt, synthetic construct
  source 1..21: mol_type = other RNA
ataaagacatttacatgtcgc

SEQ ID NO: 19221 - RNA, 21 nt, synthetic construct
  source 1..21: mol_type = other RNA
ataaagcatgatcacctgagt

SEQ ID NO: 19222 - RNA, 21 nt, synthetic construct
  source 1..21: mol_type = other RNA
ataacactaaagacagagaca

SEQ ID NO: 19223 - RNA, 21 nt, synthetic construct
  source 1..21: mol_type = other RNA
ataactcaagatatgatgctt

SEQ ID NO: 19224 - RNA, 21 nt, synthetic construct
  source 1..21: mol_type = other RNA
ataaggtccctggatagactt

SEQ ID NO: 19225 - RNA, 21 nt, synthetic construct
  source 1..21: mol_type = other RNA
ataagtagtgataatccgcag

SEQ ID NO: 19226 - RNA, 21 nt, synthetic construct
  source 1..21: mol_type = other RNA
ataataccaacattttaacac

SEQ ID NO: 19227 - RNA, 21 nt, synthetic construct
  source 1..21: mol_type = other RNA
ataatgaattttagggaggtg

SEQ ID NO: 19228 - RNA, 21 nt, synthetic construct
  source 1..21: mol_type = other RNA
ataattcctcaggataaaact

SEQ ID NO: 19229 - RNA, 21 nt, synthetic construct
  source 1..21: mol_type = other RNA
atacaaatgaacccagcctaa

SEQ ID NO: 19230 - RNA, 21 nt, synthetic construct
  source 1..21: mol_type = other RNA
ataccaacattttaacaccaa

SEQ ID NO: 19231 - RNA, 21 nt, synthetic construct
  source 1..21: mol_type = other RNA
ataccagccacttttccaatg

SEQ ID NO: 19232 - RNA, 21 nt, synthetic construct
  source 1..21: mol_type = other RNA
ataccatttgagacccttgct

SEQ ID NO: 19233 - RNA, 21 nt, synthetic construct
  source 1..21: mol_type = other RNA
atacctctcatttctgttctt

SEQ ID NO: 19234 - RNA, 21 nt, synthetic construct
  source 1..21: mol_type = other RNA
atacgtggacattgatggttt

SEQ ID NO: 19235 - RNA, 21 nt, synthetic construct
  source 1..21: mol_type = other RNA
atactacacacacaaatatga

SEQ ID NO: 19236 - RNA, 21 nt, synthetic construct
  source 1..21: mol_type = other RNA
atactagaggagcaagtacaa

SEQ ID NO: 19237 - RNA, 21 nt, synthetic construct
  source 1..21: mol_type = other RNA
atactaggagctcaggagtac

SEQ ID NO: 19238 - RNA, 21 nt, synthetic construct
  source 1..21: mol_type = other RNA
atactctgatgtctagccaac

SEQ ID NO: 19239 - RNA, 21 nt, synthetic construct
  source 1..21: mol_type = other RNA
atactgtccacagttgcaatt

SEQ ID NO: 19240 - RNA, 21 nt, synthetic construct
  source 1..21: mol_type = other RNA
atacttgatcccattttccat

SEQ ID NO: 19241 - RNA, 21 nt, synthetic construct
  source 1..21: mol_type = other RNA
atagaacaacagaccatggaa

SEQ ID NO: 19242 - RNA, 21 nt, synthetic construct
  source 1..21: mol_type = other RNA
atagactttcctcaatttaac

SEQ ID NO: 19243 - RNA, 21 nt, synthetic construct
  source 1..21: mol_type = other RNA
atagagacgtcatatatcttt

SEQ ID NO: 19244 - RNA, 21 nt, synthetic construct
  source 1..21: mol_type = other RNA
atagagcatgaaaatgacagg

SEQ ID NO: 19245 - RNA, 21 nt, synthetic construct
  source 1..21: mol_type = other RNA
atagcactagctttctccctc

SEQ ID NO: 19246 - RNA, 21 nt, synthetic construct
  source 1..21: mol_type = other RNA
atagctgtagccccggacttg

SEQ ID NO: 19247 - RNA, 21 nt, synthetic construct
  source 1..21: mol_type = other RNA
atagcttccaaattgctgtct

SEQ ID NO: 19248 - RNA, 21 nt, synthetic construct
  source 1..21: mol_type = other RNA
ataggtctgtgtgatacaaat

SEQ ID NO: 19249 - RNA, 21 nt, synthetic construct
  source 1..21: mol_type = other RNA
atagtaattctggggttgttg

SEQ ID NO: 19250 - RNA, 21 nt, synthetic construct
  source 1..21: mol_type = other RNA
atagtgtcttgtactcctgag

SEQ ID NO: 19251 - RNA, 21 nt, synthetic construct
  source 1..21: mol_type = other RNA
atatatcagaacttgaatgaa

SEQ ID NO: 19252 - RNA, 21 nt, synthetic construct
  source 1..21: mol_type = other RNA
atatatctttgtggggtggtt

SEQ ID NO: 19253 - RNA, 21 nt, synthetic construct
  source 1..21: mol_type = other RNA
atatatgacgtctctatgatt

SEQ ID NO: 19254 - RNA, 21 nt, synthetic construct
  source 1..21: mol_type = other RNA
atatatttaactatgtagctc

SEQ ID NO: 19255 - RNA, 21 nt, synthetic construct
  source 1..21: mol_type = other RNA
atatatttagctgaaagctaa

SEQ ID NO: 19256 - RNA, 21 nt, synthetic construct
  source 1..21: mol_type = other RNA
atatcagaacttgaatgaaga

SEQ ID NO: 19257 - RNA, 21 nt, synthetic construct
  source 1..21: mol_type = other RNA
atatctttgtggggtggttct

SEQ ID NO: 19258 - RNA, 21 nt, synthetic construct
  source 1..21: mol_type = other RNA
atatgacctctctcctgaagt

SEQ ID NO: 19259 - RNA, 21 nt, synthetic construct
  source 1..21: mol_type = other RNA
atatgacgtctctatgatttg

SEQ ID NO: 19260 - RNA, 21 nt, synthetic construct
  source 1..21: mol_type = other RNA
atatgatgcttagagctcctc

SEQ ID NO: 19261 - RNA, 21 nt, synthetic construct
  source 1..21: mol_type = other RNA
atatgtggcccaagacagttc

SEQ ID NO: 19262 - RNA, 21 nt, synthetic construct
  source 1..21: mol_type = other RNA
atatttaactatgtagctcct

SEQ ID NO: 19263 - RNA, 21 nt, synthetic construct
  source 1..21: mol_type = other RNA
atatttagctgaaagctaagt

SEQ ID NO: 19264 - RNA, 21 nt, synthetic construct
  source 1..21: mol_type = other RNA
atatttgtgtgtgtagtatgt

SEQ ID NO: 19265 - RNA, 21 nt, synthetic construct
  source 1..21: mol_type = other RNA
atcaaaagataacactaaaga

SEQ ID NO: 19266 - RNA, 21 nt, synthetic construct
  source 1..21: mol_type = other RNA
atcaagagagggagaaagcta

SEQ ID NO: 19267 - RNA, 21 nt, synthetic construct
  source 1..21: mol_type = other RNA
atcaagataaacatttaagaa

SEQ ID NO: 19268 - RNA, 21 nt, synthetic construct
  source 1..21: mol_type = other RNA
atcaagtatgagtgagagttg

SEQ ID NO: 19269 - RNA, 21 nt, synthetic construct
  source 1..21: mol_type = other RNA
atcaagtgtttccaggaagtg

SEQ ID NO: 19270 - RNA, 21 nt, synthetic construct
  source 1..21: mol_type = other RNA
atcaatgtccacgtattctgt

SEQ ID NO: 19271 - RNA, 21 nt, synthetic construct
  source 1..21: mol_type = other RNA
atcacaaagtaagttttatcc

SEQ ID NO: 19272 - RNA, 21 nt, synthetic construct
  source 1..21: mol_type = other RNA
atcacacagacctattcttca

SEQ ID NO: 19273 - RNA, 21 nt, synthetic construct
  source 1..21: mol_type = other RNA
atcacacaggcatctgagatc

SEQ ID NO: 19274 - RNA, 21 nt, synthetic construct
  source 1..21: mol_type = other RNA
atcacattcacgagaacagaa

SEQ ID NO: 19275 - RNA, 21 nt, synthetic construct
  source 1..21: mol_type = other RNA
atcacctgagttttataccat

SEQ ID NO: 19276 - RNA, 21 nt, synthetic construct
  source 1..21: mol_type = other RNA
atcacctggactgtgaagacg

SEQ ID NO: 19277 - RNA, 21 nt, synthetic construct
  source 1..21: mol_type = other RNA
atcactacttatcatttttgg

SEQ ID NO: 19278 - RNA, 21 nt, synthetic construct
  source 1..21: mol_type = other RNA
atcagaacttgaatgaagaat

SEQ ID NO: 19279 - RNA, 21 nt, synthetic construct
  source 1..21: mol_type = other RNA
atcagagtatactaggagctc

SEQ ID NO: 19280 - RNA, 21 nt, synthetic construct
  source 1..21: mol_type = other RNA
atcagcaatgacaacaacccc

SEQ ID NO: 19281 - RNA, 21 nt, synthetic construct
  source 1..21: mol_type = other RNA
atcagctgtcctttatatgtg

SEQ ID NO: 19282 - RNA, 21 nt, synthetic construct
  source 1..21: mol_type = other RNA
atcagttactaactggtaaga

SEQ ID NO: 19283 - RNA, 21 nt, synthetic construct
  source 1..21: mol_type = other RNA
atcatagagacgtcatatatc

SEQ ID NO: 19284 - RNA, 21 nt, synthetic construct
  source 1..21: mol_type = other RNA
atcatcctaacaagatgtaag

SEQ ID NO: 19285 - RNA, 21 nt, synthetic construct
  source 1..21: mol_type = other RNA
atcatgctttatgtctgtctc

SEQ ID NO: 19286 - RNA, 21 nt, synthetic construct
  source 1..21: mol_type = other RNA
atcatttttggagcatttttc

SEQ ID NO: 19287 - RNA, 21 nt, synthetic construct
  source 1..21: mol_type = other RNA
atccaaactcattaacgcttg

SEQ ID NO: 19288 - RNA, 21 nt, synthetic construct
  source 1..21: mol_type = other RNA
atccaattctctgtaaagcag

SEQ ID NO: 19289 - RNA, 21 nt, synthetic construct
  source 1..21: mol_type = other RNA
atccacagaacaagtccgggg

SEQ ID NO: 19290 - RNA, 21 nt, synthetic construct
  source 1..21: mol_type = other RNA
atccagggaccttatgcatca

SEQ ID NO: 19291 - RNA, 21 nt, synthetic construct
  source 1..21: mol_type = other RNA
atccatcttacatcttgttag

SEQ ID NO: 19292 - RNA, 21 nt, synthetic construct
  source 1..21: mol_type = other RNA
atcccagctaaggaaaaagga

SEQ ID NO: 19293 - RNA, 21 nt, synthetic construct
  source 1..21: mol_type = other RNA
atcccattttccatttgttgt

SEQ ID NO: 19294 - RNA, 21 nt, synthetic construct
  source 1..21: mol_type = other RNA
atccctaccaggcatcttagc

SEQ ID NO: 19295 - RNA, 21 nt, synthetic construct
  source 1..21: mol_type = other RNA
atcctaacaagatgtaagatg

SEQ ID NO: 19296 - RNA, 21 nt, synthetic construct
  source 1..21: mol_type = other RNA
atcctgaggaattataatacc

SEQ ID NO: 19297 - RNA, 21 nt, synthetic construct
  source 1..21: mol_type = other RNA
atcctgcagattcaaatgtca

SEQ ID NO: 19298 - RNA, 21 nt, synthetic construct
  source 1..21: mol_type = other RNA
atcctgtaaaccaggggtgtc

SEQ ID NO: 19299 - RNA, 21 nt, synthetic construct
  source 1..21: mol_type = other RNA
atcctttttccttagctggga

SEQ ID NO: 19300 - RNA, 21 nt, synthetic construct
  source 1..21: mol_type = other RNA
atctaatttgaattgcaactg

SEQ ID NO: 19301 - RNA, 21 nt, synthetic construct
  source 1..21: mol_type = other RNA
atctcacctccctaaaattca

SEQ ID NO: 19302 - RNA, 21 nt, synthetic construct
  source 1..21: mol_type = other RNA
atctcagatgcctgtgtgata

SEQ ID NO: 19303 - RNA, 21 nt, synthetic construct
  source 1..21: mol_type = other RNA
atctcccctttggtcatgcct

SEQ ID NO: 19304 - RNA, 21 nt, synthetic construct
  source 1..21: mol_type = other RNA
atctccctttttcttcctcta

SEQ ID NO: 19305 - RNA, 21 nt, synthetic construct
  source 1..21: mol_type = other RNA
atctgagatcagttactaact

SEQ ID NO: 19306 - RNA, 21 nt, synthetic construct
  source 1..21: mol_type = other RNA
atctgaggttaggcaacatct

SEQ ID NO: 19307 - RNA, 21 nt, synthetic construct
  source 1..21: mol_type = other RNA
atctgcaggattaaaagcagc

SEQ ID NO: 19308 - RNA, 21 nt, synthetic construct
  source 1..21: mol_type = other RNA
atctgtctggtttcgcgagac

SEQ ID NO: 19309 - RNA, 21 nt, synthetic construct
  source 1..21: mol_type = other RNA
atcttacatcttgttaggatg

SEQ ID NO: 19310 - RNA, 21 nt, synthetic construct
  source 1..21: mol_type = other RNA
atcttagcaactctcactcat

SEQ ID NO: 19311 - RNA, 21 nt, synthetic construct
  source 1..21: mol_type = other RNA
atcttcctttaggacaatcat

SEQ ID NO: 19312 - RNA, 21 nt, synthetic construct
  source 1..21: mol_type = other RNA
atcttgactactgctttacag

SEQ ID NO: 19313 - RNA, 21 nt, synthetic construct
  source 1..21: mol_type = other RNA
atcttgagcattggaaaagtg

SEQ ID NO: 19314 - RNA, 21 nt, synthetic construct
  source 1..21: mol_type = other RNA
atcttgagttatagaaaacaa

SEQ ID NO: 19315 - RNA, 21 nt, synthetic construct
  source 1..21: mol_type = other RNA
atcttgggtagcctggtgtct

SEQ ID NO: 19316 - RNA, 21 nt, synthetic construct
  source 1..21: mol_type = other RNA
atcttgttaggatgattgtcc

SEQ ID NO: 19317 - RNA, 21 nt, synthetic construct
  source 1..21: mol_type = other RNA
atctttaaaaatggtttgttg

SEQ ID NO: 19318 - RNA, 21 nt, synthetic construct
  source 1..21: mol_type = other RNA
atctttcggcttccctgggcc

SEQ ID NO: 19319 - RNA, 21 nt, synthetic construct
  source 1..21: mol_type = other RNA
atctttgtggggtggttcttt

SEQ ID NO: 19320 - RNA, 21 nt, synthetic construct
  source 1..21: mol_type = other RNA
atcttttgatccatcttacat

SEQ ID NO: 19321 - RNA, 21 nt, synthetic construct
  source 1..21: mol_type = other RNA
atgaaaaagctgttaaattga

SEQ ID NO: 19322 - RNA, 21 nt, synthetic construct
  source 1..21: mol_type = other RNA
atgaaaatgacaggtgaaact

SEQ ID NO: 19323 - RNA, 21 nt, synthetic construct
  source 1..21: mol_type = other RNA
atgaaatgtaatgggccagag

SEQ ID NO: 19324 - RNA, 21 nt, synthetic construct
  source 1..21: mol_type = other RNA
atgaacccagcctaaatttct

SEQ ID NO: 19325 - RNA, 21 nt, synthetic construct
  source 1..21: mol_type = other RNA
atgaagaataggtctgtgtga

SEQ ID NO: 19326 - RNA, 21 nt, synthetic construct
  source 1..21: mol_type = other RNA
atgaattctgttctcgtgaat

SEQ ID NO: 19327 - RNA, 21 nt, synthetic construct
  source 1..21: mol_type = other RNA
atgaattgcagttacccaaat

SEQ ID NO: 19328 - RNA, 21 nt, synthetic construct
  source 1..21: mol_type = other RNA
atgaattttagggaggtgaga

SEQ ID NO: 19329 - RNA, 21 nt, synthetic construct
  source 1..21: mol_type = other RNA
atgacaacaaccccagaatta

SEQ ID NO: 19330 - RNA, 21 nt, synthetic construct
  source 1..21: mol_type = other RNA
atgacaggtgaaactccatta

SEQ ID NO: 19331 - RNA, 21 nt, synthetic construct
  source 1..21: mol_type = other RNA
atgacatttgaatctgcagga

SEQ ID NO: 19332 - RNA, 21 nt, synthetic construct
  source 1..21: mol_type = other RNA
atgaccaaaggggagatgaca

SEQ ID NO: 19333 - RNA, 21 nt, synthetic construct
  source 1..21: mol_type = other RNA
atgacccaaactgccctttta

SEQ ID NO: 19334 - RNA, 21 nt, synthetic construct
  source 1..21: mol_type = other RNA
atgacccacgcagtacaaact

SEQ ID NO: 19335 - RNA, 21 nt, synthetic construct
  source 1..21: mol_type = other RNA
atgacctctctcctgaagtca

SEQ ID NO: 19336 - RNA, 21 nt, synthetic construct
  source 1..21: mol_type = other RNA
atgacgtctctatgatttggg

SEQ ID NO: 19337 - RNA, 21 nt, synthetic construct
  source 1..21: mol_type = other RNA
atgagaggtatttagaggaag

SEQ ID NO: 19338 - RNA, 21 nt, synthetic construct
  source 1..21: mol_type = other RNA
atgagtgagagttgctaagat

SEQ ID NO: 19339 - RNA, 21 nt, synthetic construct
  source 1..21: mol_type = other RNA
atgataagtagtgataatccg

SEQ ID NO: 19340 - RNA, 21 nt, synthetic construct
  source 1..21: mol_type = other RNA
atgatcacctgagttttatac

SEQ ID NO: 19341 - RNA, 21 nt, synthetic construct
  source 1..21: mol_type = other RNA
atgatgcttagagctcctcca

SEQ ID NO: 19342 - RNA, 21 nt, synthetic construct
  source 1..21: mol_type = other RNA
atgattgtcctaaaggaagat

SEQ ID NO: 19343 - RNA, 21 nt, synthetic construct
  source 1..21: mol_type = other RNA
atgatttgggtaactgcaatt

SEQ ID NO: 19344 - RNA, 21 nt, synthetic construct
  source 1..21: mol_type = other RNA
atgcaaaggggtagagagcct

SEQ ID NO: 19345 - RNA, 21 nt, synthetic construct
  source 1..21: mol_type = other RNA
atgcataaggtccctggatag

SEQ ID NO: 19346 - RNA, 21 nt, synthetic construct
  source 1..21: mol_type = other RNA
atgcataatgaattttaggga

SEQ ID NO: 19347 - RNA, 21 nt, synthetic construct
  source 1..21: mol_type = other RNA
atgcatcacattcacgagaac

SEQ ID NO: 19348 - RNA, 21 nt, synthetic construct
  source 1..21: mol_type = other RNA
atgcctggtagggatgcaaag

SEQ ID NO: 19349 - RNA, 21 nt, synthetic construct
  source 1..21: mol_type = other RNA
atgcctgtgtgatagcttcca

SEQ ID NO: 19350 - RNA, 21 nt, synthetic construct
  source 1..21: mol_type = other RNA
atgccttccatggtctgttgt

SEQ ID NO: 19351 - RNA, 21 nt, synthetic construct
  source 1..21: mol_type = other RNA
atgcggcccgcgggttagaca

SEQ ID NO: 19352 - RNA, 21 nt, synthetic construct
  source 1..21: mol_type = other RNA
atgctacactttggtggtgca

SEQ ID NO: 19353 - RNA, 21 nt, synthetic construct
  source 1..21: mol_type = other RNA
atgctacccttgctgctttta

SEQ ID NO: 19354 - RNA, 21 nt, synthetic construct
  source 1..21: mol_type = other RNA
atgctcaagattaataaaatg

SEQ ID NO: 19355 - RNA, 21 nt, synthetic construct
  source 1..21: mol_type = other RNA
atgctccaaaaatgataagta

SEQ ID NO: 19356 - RNA, 21 nt, synthetic construct
  source 1..21: mol_type = other RNA
atgctctatcttcctttagga

SEQ ID NO: 19357 - RNA, 21 nt, synthetic construct
  source 1..21: mol_type = other RNA
atgcttagagctcctccaatc

SEQ ID NO: 19358 - RNA, 21 nt, synthetic construct
  source 1..21: mol_type = other RNA
atgctttatgtctgtctctag

SEQ ID NO: 19359 - RNA, 21 nt, synthetic construct
  source 1..21: mol_type = other RNA
atggaaaatgggatcaagtat

SEQ ID NO: 19360 - RNA, 21 nt, synthetic construct
  source 1..21: mol_type = other RNA
atggaaggcatgaccaaaggg

SEQ ID NO: 19361 - RNA, 21 nt, synthetic construct
  source 1..21: mol_type = other RNA
atggaatctcacctccctaaa

SEQ ID NO: 19362 - RNA, 21 nt, synthetic construct
  source 1..21: mol_type = other RNA
atggaatgaattgcagttacc

SEQ ID NO: 19363 - RNA, 21 nt, synthetic construct
  source 1..21: mol_type = other RNA
atggagtgagcgacatgtaaa

SEQ ID NO: 19364 - RNA, 21 nt, synthetic construct
  source 1..21: mol_type = other RNA
atggagtttcacctgtcattt

SEQ ID NO: 19365 - RNA, 21 nt, synthetic construct
  source 1..21: mol_type = other RNA
atggatcaaaagataacacta

SEQ ID NO: 19366 - RNA, 21 nt, synthetic construct
  source 1..21: mol_type = other RNA
atgggacccaggacagctttg

SEQ ID NO: 19367 - RNA, 21 nt, synthetic construct
  source 1..21: mol_type = other RNA
atgggatcaagtatgagtgag

SEQ ID NO: 19368 - RNA, 21 nt, synthetic construct
  source 1..21: mol_type = other RNA
atgggccagagagcttcagct

SEQ ID NO: 19369 - RNA, 21 nt, synthetic construct
  source 1..21: mol_type = other RNA
atggtataaaactcaggtgat

SEQ ID NO: 19370 - RNA, 21 nt, synthetic construct
  source 1..21: mol_type = other RNA
atggtctgttgttctatgacc

SEQ ID NO: 19371 - RNA, 21 nt, synthetic construct
  source 1..21: mol_type = other RNA
atggtttgacattttattaat

SEQ ID NO: 19372 - RNA, 21 nt, synthetic construct
  source 1..21: mol_type = other RNA
atggtttgttggacttagctt

SEQ ID NO: 19373 - RNA, 21 nt, synthetic construct
  source 1..21: mol_type = other RNA
atggttttctctttttactga

SEQ ID NO: 19374 - RNA, 21 nt, synthetic construct
  source 1..21: mol_type = other RNA
atgtaagatggatcaaaagat

SEQ ID NO: 19375 - RNA, 21 nt, synthetic construct
  source 1..21: mol_type = other RNA
atgtaatgggccagagagctt

SEQ ID NO: 19376 - RNA, 21 nt, synthetic construct
  source 1..21: mol_type = other RNA
atgtagctcctgtaacagttt

SEQ ID NO: 19377 - RNA, 21 nt, synthetic construct
  source 1..21: mol_type = other RNA
atgtcaaaccataaagacatt

SEQ ID NO: 19378 - RNA, 21 nt, synthetic construct
  source 1..21: mol_type = other RNA
atgtcatctcccctttggtca

SEQ ID NO: 19379 - RNA, 21 nt, synthetic construct
  source 1..21: mol_type = other RNA
atgtccacgtattctgtaatc

SEQ ID NO: 19380 - RNA, 21 nt, synthetic construct
  source 1..21: mol_type = other RNA
atgtcgctcactccatttact

SEQ ID NO: 19381 - RNA, 21 nt, synthetic construct
  source 1..21: mol_type = other RNA
atgtctagccaactttaagta

SEQ ID NO: 19382 - RNA, 21 nt, synthetic construct
  source 1..21: mol_type = other RNA
atgtctgaatactagaggagc

SEQ ID NO: 19383 - RNA, 21 nt, synthetic construct
  source 1..21: mol_type = other RNA
atgtctgtctctagaaaaatg

SEQ ID NO: 19384 - RNA, 21 nt, synthetic construct
  source 1..21: mol_type = other RNA
atgtgacttcaggagagaggt

SEQ ID NO: 19385 - RNA, 21 nt, synthetic construct
  source 1..21: mol_type = other RNA
atgtgatgcataaggtccctg

SEQ ID NO: 19386 - RNA, 21 nt, synthetic construct
  source 1..21: mol_type = other RNA
atgtgcctgccttggacaaca

SEQ ID NO: 19387 - RNA, 21 nt, synthetic construct
  source 1..21: mol_type = other RNA
atgtggaaaatagtgaaaaat

SEQ ID NO: 19388 - RNA, 21 nt, synthetic construct
  source 1..21: mol_type = other RNA
atgtggcccaagacagttctt

SEQ ID NO: 19389 - RNA, 21 nt, synthetic construct
  source 1..21: mol_type = other RNA
atgttgcctaacctcagatcc

SEQ ID NO: 19390 - RNA, 21 nt, synthetic construct
  source 1..21: mol_type = other RNA
atgttggtattataattcctc

SEQ ID NO: 19391 - RNA, 21 nt, synthetic construct
  source 1..21: mol_type = other RNA
attaaaagcagcaagggtagc

SEQ ID NO: 19392 - RNA, 21 nt, synthetic construct
  source 1..21: mol_type = other RNA
attaaactgttacaggagcta

SEQ ID NO: 19393 - RNA, 21 nt, synthetic construct
  source 1..21: mol_type = other RNA
attaacgcttgctttcactgt

SEQ ID NO: 19394 - RNA, 21 nt, synthetic construct
  source 1..21: mol_type = other RNA
attaagatttaacctgatgct

SEQ ID NO: 19395 - RNA, 21 nt, synthetic construct
  source 1..21: mol_type = other RNA
attaaggcttgagctggggct

SEQ ID NO: 19396 - RNA, 21 nt, synthetic construct
  source 1..21: mol_type = other RNA
attaatcttgagcattggaaa

SEQ ID NO: 19397 - RNA, 21 nt, synthetic construct
  source 1..21: mol_type = other RNA
attacagaatacgtggacatt

SEQ ID NO: 19398 - RNA, 21 nt, synthetic construct
  source 1..21: mol_type = other RNA
attaccttaactattctgagc

SEQ ID NO: 19399 - RNA, 21 nt, synthetic construct
  source 1..21: mol_type = other RNA
attactatgacccacgcagta

SEQ ID NO: 19400 - RNA, 21 nt, synthetic construct
  source 1..21: mol_type = other RNA
attactggcttgtactgttta

SEQ ID NO: 19401 - RNA, 21 nt, synthetic construct
  source 1..21: mol_type = other RNA
attatatatttagctgaaagc

SEQ ID NO: 19402 - RNA, 21 nt, synthetic construct
  source 1..21: mol_type = other RNA
attatcactacttatcatttt

SEQ ID NO: 19403 - RNA, 21 nt, synthetic construct
  source 1..21: mol_type = other RNA
attcaaagctgtcctgggtcc

SEQ ID NO: 19404 - RNA, 21 nt, synthetic construct
  source 1..21: mol_type = other RNA
attcaaatgtcatctcccctt

SEQ ID NO: 19405 - RNA, 21 nt, synthetic construct
  source 1..21: mol_type = other RNA
attcacgagaacagaattcat

SEQ ID NO: 19406 - RNA, 21 nt, synthetic construct
  source 1..21: mol_type = other RNA
attcagacatagcactagctt

SEQ ID NO: 19407 - RNA, 21 nt, synthetic construct
  source 1..21: mol_type = other RNA
attcagttctttagtcatacc

SEQ ID NO: 19408 - RNA, 21 nt, synthetic construct
  source 1..21: mol_type = other RNA
attcatcctgtaaaccagggg

SEQ ID NO: 19409 - RNA, 21 nt, synthetic construct
  source 1..21: mol_type = other RNA
attcattccatgtgacttcag

SEQ ID NO: 19410 - RNA, 21 nt, synthetic construct
  source 1..21: mol_type = other RNA
attccaaaaagaaccacccca

SEQ ID NO: 19411 - RNA, 21 nt, synthetic construct
  source 1..21: mol_type = other RNA
attccatgtgacttcaggaga

SEQ ID NO: 19412 - RNA, 21 nt, synthetic construct
  source 1..21: mol_type = other RNA
attccattaaactgttacagg

SEQ ID NO: 19413 - RNA, 21 nt, synthetic construct
  source 1..21: mol_type = other RNA
attcctcaggataaaacttac

SEQ ID NO: 19414 - RNA, 21 nt, synthetic construct
  source 1..21: mol_type = other RNA
attcctccctagttcacgttc

SEQ ID NO: 19415 - RNA, 21 nt, synthetic construct
  source 1..21: mol_type = other RNA
attccttcaaaaagctcagaa

SEQ ID NO: 19416 - RNA, 21 nt, synthetic construct
  source 1..21: mol_type = other RNA
attcgtaaactttcttaaagt

SEQ ID NO: 19417 - RNA, 21 nt, synthetic construct
  source 1..21: mol_type = other RNA
attctctgtaaagcagtagtc

SEQ ID NO: 19418 - RNA, 21 nt, synthetic construct
  source 1..21: mol_type = other RNA
attctgagctttttgaaggaa

SEQ ID NO: 19419 - RNA, 21 nt, synthetic construct
  source 1..21: mol_type = other RNA
attctggggttgttgtcattg

SEQ ID NO: 19420 - RNA, 21 nt, synthetic construct
  source 1..21: mol_type = other RNA
attctgtaatccacagaacaa

SEQ ID NO: 19421 - RNA, 21 nt, synthetic construct
  source 1..21: mol_type = other RNA
attctgtccctgaccgtcttc

SEQ ID NO: 19422 - RNA, 21 nt, synthetic construct
  source 1..21: mol_type = other RNA
attctgttctcgtgaatgtga

SEQ ID NO: 19423 - RNA, 21 nt, synthetic construct
  source 1..21: mol_type = other RNA
attgaggaaagtctatccagg

SEQ ID NO: 19424 - RNA, 21 nt, synthetic construct
  source 1..21: mol_type = other RNA
attgatggttttctcttttta

SEQ ID NO: 19425 - RNA, 21 nt, synthetic construct
  source 1..21: mol_type = other RNA
attgcaactgtggacagtata

SEQ ID NO: 19426 - RNA, 21 nt, synthetic construct
  source 1..21: mol_type = other RNA
attgcagttacccaaatcata

SEQ ID NO: 19427 - RNA, 21 nt, synthetic construct
  source 1..21: mol_type = other RNA
attgctgtctctgtctttagt

SEQ ID NO: 19428 - RNA, 21 nt, synthetic construct
  source 1..21: mol_type = other RNA
attggaaaagtggctggtatg

SEQ ID NO: 19429 - RNA, 21 nt, synthetic construct
  source 1..21: mol_type = other RNA
attggacacccctggtttaca

SEQ ID NO: 19430 - RNA, 21 nt, synthetic construct
  source 1..21: mol_type = other RNA
attggaggagctctaagcatc

SEQ ID NO: 19431 - RNA, 21 nt, synthetic construct
  source 1..21: mol_type = other RNA
attggatctgaggttaggcaa

SEQ ID NO: 19432 - RNA, 21 nt, synthetic construct
  source 1..21: mol_type = other RNA
attggttccaccacaaattaa

SEQ ID NO: 19433 - RNA, 21 nt, synthetic construct
  source 1..21: mol_type = other RNA
attgtcctaaaggaagataga

SEQ ID NO: 19434 - RNA, 21 nt, synthetic construct
  source 1..21: mol_type = other RNA
attgttttctataactcaaga

SEQ ID NO: 19435 - RNA, 21 nt, synthetic construct
  source 1..21: mol_type = other RNA
atttaaatcagcaatgacaac

SEQ ID NO: 19436 - RNA, 21 nt, synthetic construct
  source 1..21: mol_type = other RNA
atttaacctgatgctacactt

SEQ ID NO: 19437 - RNA, 21 nt, synthetic construct
  source 1..21: mol_type = other RNA
atttaactatgtagctcctgt

SEQ ID NO: 19438 - RNA, 21 nt, synthetic construct
  source 1..21: mol_type = other RNA
atttaagaacgtgaactaggg

SEQ ID NO: 19439 - RNA, 21 nt, synthetic construct
  source 1..21: mol_type = other RNA
atttacatgtcgctcactcca

SEQ ID NO: 19440 - RNA, 21 nt, synthetic construct
  source 1..21: mol_type = other RNA
atttacttaaagttggctaga

SEQ ID NO: 19441 - RNA, 21 nt, synthetic construct
  source 1..21: mol_type = other RNA
atttagaggaagaaaaaggga

SEQ ID NO: 19442 - RNA, 21 nt, synthetic construct
  source 1..21: mol_type = other RNA
atttagctgaaagctaagtcc

SEQ ID NO: 19443 - RNA, 21 nt, synthetic construct
  source 1..21: mol_type = other RNA
atttaggctgggttcatttgt

SEQ ID NO: 19444 - RNA, 21 nt, synthetic construct
  source 1..21: mol_type = other RNA
atttccttactgctcagtaaa

SEQ ID NO: 19445 - RNA, 21 nt, synthetic construct
  source 1..21: mol_type = other RNA
atttctgtcctacaagttttc

SEQ ID NO: 19446 - RNA, 21 nt, synthetic construct
  source 1..21: mol_type = other RNA
atttctgttcttaccagttag

SEQ ID NO: 19447 - RNA, 21 nt, synthetic construct
  source 1..21: mol_type = other RNA
atttgaatctgcaggattaaa

SEQ ID NO: 19448 - RNA, 21 nt, synthetic construct
  source 1..21: mol_type = other RNA
atttgaattgcaactgtggac

SEQ ID NO: 19449 - RNA, 21 nt, synthetic construct
  source 1..21: mol_type = other RNA
atttgagacccttgctgcacc

SEQ ID NO: 19450 - RNA, 21 nt, synthetic construct
  source 1..21: mol_type = other RNA
atttggaagctatcacacagg

SEQ ID NO: 19451 - RNA, 21 nt, synthetic construct
  source 1..21: mol_type = other RNA
atttgggtaactgcaattcat

SEQ ID NO: 19452 - RNA, 21 nt, synthetic construct
  source 1..21: mol_type = other RNA
atttgtatcacacagacctat

SEQ ID NO: 19453 - RNA, 21 nt, synthetic construct
  source 1..21: mol_type = other RNA
atttgtggtggaaccaatctg

SEQ ID NO: 19454 - RNA, 21 nt, synthetic construct
  source 1..21: mol_type = other RNA
atttgtgtgtgtagtatgtgg

SEQ ID NO: 19455 - RNA, 21 nt, synthetic construct
  source 1..21: mol_type = other RNA
atttgttgtacttgctcctct

SEQ ID NO: 19456 - RNA, 21 nt, synthetic construct
  source 1..21: mol_type = other RNA
attttagcttttgcttgagaa

SEQ ID NO: 19457 - RNA, 21 nt, synthetic construct
  source 1..21: mol_type = other RNA
attttagggaggtgagattcc

SEQ ID NO: 19458 - RNA, 21 nt, synthetic construct
  source 1..21: mol_type = other RNA
attttatcctttttccttagc

SEQ ID NO: 19459 - RNA, 21 nt, synthetic construct
  source 1..21: mol_type = other RNA
attttcatgctctatcttcct

SEQ ID NO: 19460 - RNA, 21 nt, synthetic construct
  source 1..21: mol_type = other RNA
attttcattttatcctttttc

SEQ ID NO: 19461 - RNA, 21 nt, synthetic construct
  source 1..21: mol_type = other RNA
attttccacatactacacaca

SEQ ID NO: 19462 - RNA, 21 nt, synthetic construct
  source 1..21: mol_type = other RNA
attttccatttgttgtacttg

SEQ ID NO: 19463 - RNA, 21 nt, synthetic construct
  source 1..21: mol_type = other RNA
atttttaaagatgtgcctgcc

SEQ ID NO: 19464 - RNA, 21 nt, synthetic construct
  source 1..21: mol_type = other RNA
atttttcactattttccacat

SEQ ID NO: 19465 - RNA, 21 nt, synthetic construct
  source 1..21: mol_type = other RNA
atttttctagagacagacata

SEQ ID NO: 19466 - RNA, 21 nt, synthetic construct
  source 1..21: mol_type = other RNA
atttttggagcatttttctag

SEQ ID NO: 19467 - RNA, 21 nt, synthetic construct
  source 1..21: mol_type = other RNA
caaaaagaaccaccccacaaa

SEQ ID NO: 19468 - RNA, 21 nt, synthetic construct
  source 1..21: mol_type = other RNA
caaaaagctcagaatagttaa

SEQ ID NO: 19469 - RNA, 21 nt, synthetic construct
  source 1..21: mol_type = other RNA
caaaaatgataagtagtgata

SEQ ID NO: 19470 - RNA, 21 nt, synthetic construct
  source 1..21: mol_type = other RNA
caaaacaagcagttaaatgaa

SEQ ID NO: 19471 - RNA, 21 nt, synthetic construct
  source 1..21: mol_type = other RNA
caaaagataacactaaagaca

SEQ ID NO: 19472 - RNA, 21 nt, synthetic construct
  source 1..21: mol_type = other RNA
caaaccataaagacatttaca

SEQ ID NO: 19473 - RNA, 21 nt, synthetic construct
  source 1..21: mol_type = other RNA
caaaccatttttaaagatgtg

SEQ ID NO: 19474 - RNA, 21 nt, synthetic construct
  source 1..21: mol_type = other RNA
caaactcattaacgcttgctt

SEQ ID NO: 19475 - RNA, 21 nt, synthetic construct
  source 1..21: mol_type = other RNA
caaactgcccttttaaaaaag

SEQ ID NO: 19476 - RNA, 21 nt, synthetic construct
  source 1..21: mol_type = other RNA
caaactgctcaggagtcagaa

SEQ ID NO: 19477 - RNA, 21 nt, synthetic construct
  source 1..21: mol_type = other RNA
caaagatatatgacgtctcta

SEQ ID NO: 19478 - RNA, 21 nt, synthetic construct
  source 1..21: mol_type = other RNA
caaagctgtcctgggtcccat

SEQ ID NO: 19479 - RNA, 21 nt, synthetic construct
  source 1..21: mol_type = other RNA
caaaggggagatgacatttga

SEQ ID NO: 19480 - RNA, 21 nt, synthetic construct
  source 1..21: mol_type = other RNA
caaaggggtagagagcctggg

SEQ ID NO: 19481 - RNA, 21 nt, synthetic construct
  source 1..21: mol_type = other RNA
caaagtaagttttatcctgag

SEQ ID NO: 19482 - RNA, 21 nt, synthetic construct
  source 1..21: mol_type = other RNA
caaagtgtagcatcaggttaa

SEQ ID NO: 19483 - RNA, 21 nt, synthetic construct
  source 1..21: mol_type = other RNA
caaatatgacctctctcctga

SEQ ID NO: 19484 - RNA, 21 nt, synthetic construct
  source 1..21: mol_type = other RNA
caaatcatagagacgtcatat

SEQ ID NO: 19485 - RNA, 21 nt, synthetic construct
  source 1..21: mol_type = other RNA
caaatgaacccagcctaaatt

SEQ ID NO: 19486 - RNA, 21 nt, synthetic construct
  source 1..21: mol_type = other RNA
caaatggaaaatgggatcaag

SEQ ID NO: 19487 - RNA, 21 nt, synthetic construct
  source 1..21: mol_type = other RNA
caaatggtataaaactcaggt

SEQ ID NO: 19488 - RNA, 21 nt, synthetic construct
  source 1..21: mol_type = other RNA
caaatgtcatctcccctttgg

SEQ ID NO: 19489 - RNA, 21 nt, synthetic construct
  source 1..21: mol_type = other RNA
caaattaaggcttgagctggg

SEQ ID NO: 19490 - RNA, 21 nt, synthetic construct
  source 1..21: mol_type = other RNA
caaattgctgtctctgtcttt

SEQ ID NO: 19491 - RNA, 21 nt, synthetic construct
  source 1..21: mol_type = other RNA
caacaaaccatttttaaagat

SEQ ID NO: 19492 - RNA, 21 nt, synthetic construct
  source 1..21: mol_type = other RNA
caacaaatggaaaatgggatc

SEQ ID NO: 19493 - RNA, 21 nt, synthetic construct
  source 1..21: mol_type = other RNA
caacaaccccagaattactat

SEQ ID NO: 19494 - RNA, 21 nt, synthetic construct
  source 1..21: mol_type = other RNA
caacagaccatggaaggcatg

SEQ ID NO: 19495 - RNA, 21 nt, synthetic construct
  source 1..21: mol_type = other RNA
caacagtgaaagcaagcgtta

SEQ ID NO: 19496 - RNA, 21 nt, synthetic construct
  source 1..21: mol_type = other RNA
caacatctccctttttcttcc

SEQ ID NO: 19497 - RNA, 21 nt, synthetic construct
  source 1..21: mol_type = other RNA
caaccccagaattactatgac

SEQ ID NO: 19498 - RNA, 21 nt, synthetic construct
  source 1..21: mol_type = other RNA
caacgagactgcggattatca

SEQ ID NO: 19499 - RNA, 21 nt, synthetic construct
  source 1..21: mol_type = other RNA
caactctcactcatacttgat

SEQ ID NO: 19500 - RNA, 21 nt, synthetic construct
  source 1..21: mol_type = other RNA
caactgtggacagtatagctg

SEQ ID NO: 19501 - RNA, 21 nt, synthetic construct
  source 1..21: mol_type = other RNA
caacttgctgtaaacagtaca

SEQ ID NO: 19502 - RNA, 21 nt, synthetic construct
  source 1..21: mol_type = other RNA
caactttaagtaaatggagtg

SEQ ID NO: 19503 - RNA, 21 nt, synthetic construct
  source 1..21: mol_type = other RNA
caagaactgtcttgggccaca

SEQ ID NO: 19504 - RNA, 21 nt, synthetic construct
  source 1..21: mol_type = other RNA
caagacactattccttcaaaa

SEQ ID NO: 19505 - RNA, 21 nt, synthetic construct
  source 1..21: mol_type = other RNA
caagacagttcttgcagtgtg

SEQ ID NO: 19506 - RNA, 21 nt, synthetic construct
  source 1..21: mol_type = other RNA
caagagagggagaaagctagt

SEQ ID NO: 19507 - RNA, 21 nt, synthetic construct
  source 1..21: mol_type = other RNA
caagataaacatttaagaacg

SEQ ID NO: 19508 - RNA, 21 nt, synthetic construct
  source 1..21: mol_type = other RNA
caagatatgatgcttagagct

SEQ ID NO: 19509 - RNA, 21 nt, synthetic construct
  source 1..21: mol_type = other RNA
caagatcaagagagggagaaa

SEQ ID NO: 19510 - RNA, 21 nt, synthetic construct
  source 1..21: mol_type = other RNA
caagatcacctggactgtgaa

SEQ ID NO: 19511 - RNA, 21 nt, synthetic construct
  source 1..21: mol_type = other RNA
caagatgtaagatggatcaaa

SEQ ID NO: 19512 - RNA, 21 nt, synthetic construct
  source 1..21: mol_type = other RNA
caagcagttaaatgaaatgta

SEQ ID NO: 19513 - RNA, 21 nt, synthetic construct
  source 1..21: mol_type = other RNA
caagccagtaatggagtttca

SEQ ID NO: 19514 - RNA, 21 nt, synthetic construct
  source 1..21: mol_type = other RNA
caagccccagctcaagcctta

SEQ ID NO: 19515 - RNA, 21 nt, synthetic construct
  source 1..21: mol_type = other RNA
caagccttaatttgtggtgga

SEQ ID NO: 19516 - RNA, 21 nt, synthetic construct
  source 1..21: mol_type = other RNA
caagcgttaatgagtttggat

SEQ ID NO: 19517 - RNA, 21 nt, synthetic construct
  source 1..21: mol_type = other RNA
caaggcaggcacatctttaaa

SEQ ID NO: 19518 - RNA, 21 nt, synthetic construct
  source 1..21: mol_type = other RNA
caagggtagcattccaaaaag

SEQ ID NO: 19519 - RNA, 21 nt, synthetic construct
  source 1..21: mol_type = other RNA
caagggtctcaaatggtataa

SEQ ID NO: 19520 - RNA, 21 nt, synthetic construct
  source 1..21: mol_type = other RNA
caagtacaacaaatggaaaat

SEQ ID NO: 19521 - RNA, 21 nt, synthetic construct
  source 1..21: mol_type = other RNA
caagtatgagtgagagttgct

SEQ ID NO: 19522 - RNA, 21 nt, synthetic construct
  source 1..21: mol_type = other RNA
caagtccggggctacagctat

SEQ ID NO: 19523 - RNA, 21 nt, synthetic construct
  source 1..21: mol_type = other RNA
caagtgtttccaggaagtgaa

SEQ ID NO: 19524 - RNA, 21 nt, synthetic construct
  source 1..21: mol_type = other RNA
caagttctgatatatttaact

SEQ ID NO: 19525 - RNA, 21 nt, synthetic construct
  source 1..21: mol_type = other RNA
caagttgtctaacccgcgggc

SEQ ID NO: 19526 - RNA, 21 nt, synthetic construct
  source 1..21: mol_type = other RNA
caagttttcacttcctggaaa

SEQ ID NO: 19527 - RNA, 21 nt, synthetic construct
  source 1..21: mol_type = other RNA
caatcaagtgtttccaggaag

SEQ ID NO: 19528 - RNA, 21 nt, synthetic construct
  source 1..21: mol_type = other RNA
caatcacaaagtaagttttat

SEQ ID NO: 19529 - RNA, 21 nt, synthetic construct
  source 1..21: mol_type = other RNA
caatcatcctaacaagatgta

SEQ ID NO: 19530 - RNA, 21 nt, synthetic construct
  source 1..21: mol_type = other RNA
caatctgtctggtttcgcgag

SEQ ID NO: 19531 - RNA, 21 nt, synthetic construct
  source 1..21: mol_type = other RNA
caatgacaacaaccccagaat

SEQ ID NO: 19532 - RNA, 21 nt, synthetic construct
  source 1..21: mol_type = other RNA
caatgctcaagattaataaaa

SEQ ID NO: 19533 - RNA, 21 nt, synthetic construct
  source 1..21: mol_type = other RNA
caatgtccacgtattctgtaa

SEQ ID NO: 19534 - RNA, 21 nt, synthetic construct
  source 1..21: mol_type = other RNA
caattcattccatgtgacttc

SEQ ID NO: 19535 - RNA, 21 nt, synthetic construct
  source 1..21: mol_type = other RNA
caattctctgtaaagcagtag

SEQ ID NO: 19536 - RNA, 21 nt, synthetic construct
  source 1..21: mol_type = other RNA
caatttggaagctatcacaca

SEQ ID NO: 19537 - RNA, 21 nt, synthetic construct
  source 1..21: mol_type = other RNA
cacaaagatatatgacgtctc

SEQ ID NO: 19538 - RNA, 21 nt, synthetic construct
  source 1..21: mol_type = other RNA
cacaaagtaagttttatcctg

SEQ ID NO: 19539 - RNA, 21 nt, synthetic construct
  source 1..21: mol_type = other RNA
cacaaatatgacctctctcct

SEQ ID NO: 19540 - RNA, 21 nt, synthetic construct
  source 1..21: mol_type = other RNA
cacaaattaaggcttgagctg

SEQ ID NO: 19541 - RNA, 21 nt, synthetic construct
  source 1..21: mol_type = other RNA
cacacaaatatgacctctctc

SEQ ID NO: 19542 - RNA, 21 nt, synthetic construct
  source 1..21: mol_type = other RNA
cacacacaaatatgacctctc

SEQ ID NO: 19543 - RNA, 21 nt, synthetic construct
  source 1..21: mol_type = other RNA
cacacagacctattcttcatt

SEQ ID NO: 19544 - RNA, 21 nt, synthetic construct
  source 1..21: mol_type = other RNA
cacacaggcatctgagatcag

SEQ ID NO: 19545 - RNA, 21 nt, synthetic construct
  source 1..21: mol_type = other RNA
cacactgcaagaactgtcttg

SEQ ID NO: 19546 - RNA, 21 nt, synthetic construct
  source 1..21: mol_type = other RNA
cacagaacaagtccggggcta

SEQ ID NO: 19547 - RNA, 21 nt, synthetic construct
  source 1..21: mol_type = other RNA
cacagacctattcttcattca

SEQ ID NO: 19548 - RNA, 21 nt, synthetic construct
  source 1..21: mol_type = other RNA
cacaggcatctgagatcagtt

SEQ ID NO: 19549 - RNA, 21 nt, synthetic construct
  source 1..21: mol_type = other RNA
cacagtccaggtgatcttgac

SEQ ID NO: 19550 - RNA, 21 nt, synthetic construct
  source 1..21: mol_type = other RNA
cacatactacacacacaaata

SEQ ID NO: 19551 - RNA, 21 nt, synthetic construct
  source 1..21: mol_type = other RNA
cacatataaaggacagctgat

SEQ ID NO: 19552 - RNA, 21 nt, synthetic construct
  source 1..21: mol_type = other RNA
cacatctttaaaaatggtttg

SEQ ID NO: 19553 - RNA, 21 nt, synthetic construct
  source 1..21: mol_type = other RNA
cacatggaatgaattgcagtt

SEQ ID NO: 19554 - RNA, 21 nt, synthetic construct
  source 1..21: mol_type = other RNA
cacattcacgagaacagaatt

SEQ ID NO: 19555 - RNA, 21 nt, synthetic construct
  source 1..21: mol_type = other RNA
caccaaagtgtagcatcaggt

SEQ ID NO: 19556 - RNA, 21 nt, synthetic construct
  source 1..21: mol_type = other RNA
caccaaatgctttttatattg

SEQ ID NO: 19557 - RNA, 21 nt, synthetic construct
  source 1..21: mol_type = other RNA
caccacaaattaaggcttgag

SEQ ID NO: 19558 - RNA, 21 nt, synthetic construct
  source 1..21: mol_type = other RNA
caccaccaaagtgtagcatca

SEQ ID NO: 19559 - RNA, 21 nt, synthetic construct
  source 1..21: mol_type = other RNA
caccaggctacccaagatcaa

SEQ ID NO: 19560 - RNA, 21 nt, synthetic construct
  source 1..21: mol_type = other RNA
caccccacaaagatatatgac

SEQ ID NO: 19561 - RNA, 21 nt, synthetic construct
  source 1..21: mol_type = other RNA
cacccctggtttacaggatga

SEQ ID NO: 19562 - RNA, 21 nt, synthetic construct
  source 1..21: mol_type = other RNA
caccctctctccccaggctct

SEQ ID NO: 19563 - RNA, 21 nt, synthetic construct
  source 1..21: mol_type = other RNA
cacctccctaaaattcattat

SEQ ID NO: 19564 - RNA, 21 nt, synthetic construct
  source 1..21: mol_type = other RNA
cacctgagttttataccattt

SEQ ID NO: 19565 - RNA, 21 nt, synthetic construct
  source 1..21: mol_type = other RNA
cacctggactgtgaagacggt

SEQ ID NO: 19566 - RNA, 21 nt, synthetic construct
  source 1..21: mol_type = other RNA
cacctgtcattttcatgctct

SEQ ID NO: 19567 - RNA, 21 nt, synthetic construct
  source 1..21: mol_type = other RNA
cacgagaacagaattcatcct

SEQ ID NO: 19568 - RNA, 21 nt, synthetic construct
  source 1..21: mol_type = other RNA
cacgcagtacaaactgctcag

SEQ ID NO: 19569 - RNA, 21 nt, synthetic construct
  source 1..21: mol_type = other RNA
cacgtattctgtaatccacag

SEQ ID NO: 19570 - RNA, 21 nt, synthetic construct
  source 1..21: mol_type = other RNA
cacgttcttaaatgtttatct

SEQ ID NO: 19571 - RNA, 21 nt, synthetic construct
  source 1..21: mol_type = other RNA
cactaaagacagagacagcaa

SEQ ID NO: 19572 - RNA, 21 nt, synthetic construct
  source 1..21: mol_type = other RNA
cactacttatcatttttggag

SEQ ID NO: 19573 - RNA, 21 nt, synthetic construct
  source 1..21: mol_type = other RNA
cactagctttctccctctctt

SEQ ID NO: 19574 - RNA, 21 nt, synthetic construct
  source 1..21: mol_type = other RNA
cactattccttcaaaaagctc

SEQ ID NO: 19575 - RNA, 21 nt, synthetic construct
  source 1..21: mol_type = other RNA
cactattttccacatactaca

SEQ ID NO: 19576 - RNA, 21 nt, synthetic construct
  source 1..21: mol_type = other RNA
cactcatacttgatcccattt

SEQ ID NO: 19577 - RNA, 21 nt, synthetic construct
  source 1..21: mol_type = other RNA
cactccatttacttaaagttg

SEQ ID NO: 19578 - RNA, 21 nt, synthetic construct
  source 1..21: mol_type = other RNA
cactgcaagaactgtcttggg

SEQ ID NO: 19579 - RNA, 21 nt, synthetic construct
  source 1..21: mol_type = other RNA
cactgctgggtaagagtcaag

SEQ ID NO: 19580 - RNA, 21 nt, synthetic construct
  source 1..21: mol_type = other RNA
cactggtttctcaagcaaaag

SEQ ID NO: 19581 - RNA, 21 nt, synthetic construct
  source 1..21: mol_type = other RNA
cactgttgtccaaggcaggca

SEQ ID NO: 19582 - RNA, 21 nt, synthetic construct
  source 1..21: mol_type = other RNA
cacttcctggaaacacttgat

SEQ ID NO: 19583 - RNA, 21 nt, synthetic construct
  source 1..21: mol_type = other RNA
cacttgattggaggagctcta

SEQ ID NO: 19584 - RNA, 21 nt, synthetic construct
  source 1..21: mol_type = other RNA
cactttggtggtgcagcaagg

SEQ ID NO: 19585 - RNA, 21 nt, synthetic construct
  source 1..21: mol_type = other RNA
cacttttccaatgctcaagat

SEQ ID NO: 19586 - RNA, 21 nt, synthetic construct
  source 1..21: mol_type = other RNA
cagaaatgagaggtatttaga

SEQ ID NO: 19587 - RNA, 21 nt, synthetic construct
  source 1..21: mol_type = other RNA
cagaaatttaggctgggttca

SEQ ID NO: 19588 - RNA, 21 nt, synthetic construct
  source 1..21: mol_type = other RNA
cagaacaagtccggggctaca

SEQ ID NO: 19589 - RNA, 21 nt, synthetic construct
  source 1..21: mol_type = other RNA
cagaacttgaatgaagaatag

SEQ ID NO: 19590 - RNA, 21 nt, synthetic construct
  source 1..21: mol_type = other RNA
cagaagaaaactgctttttta

SEQ ID NO: 19591 - RNA, 21 nt, synthetic construct
  source 1..21: mol_type = other RNA
cagaatacgtggacattgatg

SEQ ID NO: 19592 - RNA, 21 nt, synthetic construct
  source 1..21: mol_type = other RNA
cagaatagttaaggtaattta

SEQ ID NO: 19593 - RNA, 21 nt, synthetic construct
  source 1..21: mol_type = other RNA
cagaatcccagctaaggaaaa

SEQ ID NO: 19594 - RNA, 21 nt, synthetic construct
  source 1..21: mol_type = other RNA
cagaattactatgacccacgc

SEQ ID NO: 19595 - RNA, 21 nt, synthetic construct
  source 1..21: mol_type = other RNA
cagaattcatcctgtaaacca

SEQ ID NO: 19596 - RNA, 21 nt, synthetic construct
  source 1..21: mol_type = other RNA
cagacagattggttccaccac

SEQ ID NO: 19597 - RNA, 21 nt, synthetic construct
  source 1..21: mol_type = other RNA
cagacataaagcatgatcacc

SEQ ID NO: 19598 - RNA, 21 nt, synthetic construct
  source 1..21: mol_type = other RNA
cagacatagcactagctttct

SEQ ID NO: 19599 - RNA, 21 nt, synthetic construct
  source 1..21: mol_type = other RNA
cagaccatggaaggcatgacc

SEQ ID NO: 19600 - RNA, 21 nt, synthetic construct
  source 1..21: mol_type = other RNA
cagacctattcttcattcaag

SEQ ID NO: 19601 - RNA, 21 nt, synthetic construct
  source 1..21: mol_type = other RNA
cagagaattggatctgaggtt

SEQ ID NO: 19602 - RNA, 21 nt, synthetic construct
  source 1..21: mol_type = other RNA
cagagacagcaatttggaagc

SEQ ID NO: 19603 - RNA, 21 nt, synthetic construct
  source 1..21: mol_type = other RNA
cagagagcttcagcttttatt

SEQ ID NO: 19604 - RNA, 21 nt, synthetic construct
  source 1..21: mol_type = other RNA
cagagtatactaggagctcag

SEQ ID NO: 19605 - RNA, 21 nt, synthetic construct
  source 1..21: mol_type = other RNA
cagatccaattctctgtaaag

SEQ ID NO: 19606 - RNA, 21 nt, synthetic construct
  source 1..21: mol_type = other RNA
cagatgcctgtgtgatagctt

SEQ ID NO: 19607 - RNA, 21 nt, synthetic construct
  source 1..21: mol_type = other RNA
cagattcaaatgtcatctccc

SEQ ID NO: 19608 - RNA, 21 nt, synthetic construct
  source 1..21: mol_type = other RNA
cagattggttccaccacaaat

SEQ ID NO: 19609 - RNA, 21 nt, synthetic construct
  source 1..21: mol_type = other RNA
cagcaagggtagcattccaaa

SEQ ID NO: 19610 - RNA, 21 nt, synthetic construct
  source 1..21: mol_type = other RNA
cagcaagggtctcaaatggta

SEQ ID NO: 19611 - RNA, 21 nt, synthetic construct
  source 1..21: mol_type = other RNA
cagcaagttgtctaacccgcg

SEQ ID NO: 19612 - RNA, 21 nt, synthetic construct
  source 1..21: mol_type = other RNA
cagcaatgacaacaaccccag

SEQ ID NO: 19613 - RNA, 21 nt, synthetic construct
  source 1..21: mol_type = other RNA
cagcaatttggaagctatcac

SEQ ID NO: 19614 - RNA, 21 nt, synthetic construct
  source 1..21: mol_type = other RNA
cagcagtgcttttattcctcc

SEQ ID NO: 19615 - RNA, 21 nt, synthetic construct
  source 1..21: mol_type = other RNA
cagccacttttccaatgctca

SEQ ID NO: 19616 - RNA, 21 nt, synthetic construct
  source 1..21: mol_type = other RNA
cagcctaaatttctgtcctac

SEQ ID NO: 19617 - RNA, 21 nt, synthetic construct
  source 1..21: mol_type = other RNA
cagctaaggaaaaaggataaa

SEQ ID NO: 19618 - RNA, 21 nt, synthetic construct
  source 1..21: mol_type = other RNA
cagctatactgtccacagttg

SEQ ID NO: 19619 - RNA, 21 nt, synthetic construct
  source 1..21: mol_type = other RNA
cagctcaagccttaatttgtg

SEQ ID NO: 19620 - RNA, 21 nt, synthetic construct
  source 1..21: mol_type = other RNA
cagctgtcctttatatgtggc

SEQ ID NO: 19621 - RNA, 21 nt, synthetic construct
  source 1..21: mol_type = other RNA
cagcttttatttccttactgc

SEQ ID NO: 19622 - RNA, 21 nt, synthetic construct
  source 1..21: mol_type = other RNA
cagctttttcatttttcacta

SEQ ID NO: 19623 - RNA, 21 nt, synthetic construct
  source 1..21: mol_type = other RNA
caggaagtgaaaacttgtagg

SEQ ID NO: 19624 - RNA, 21 nt, synthetic construct
  source 1..21: mol_type = other RNA
caggagagaggtcatatttgt

SEQ ID NO: 19625 - RNA, 21 nt, synthetic construct
  source 1..21: mol_type = other RNA
caggagctacatagttaaata

SEQ ID NO: 19626 - RNA, 21 nt, synthetic construct
  source 1..21: mol_type = other RNA
caggagtacaagacactattc

SEQ ID NO: 19627 - RNA, 21 nt, synthetic construct
  source 1..21: mol_type = other RNA
caggagtcagaagaaaactgc

SEQ ID NO: 19628 - RNA, 21 nt, synthetic construct
  source 1..21: mol_type = other RNA
caggataaaacttactttgtg

SEQ ID NO: 19629 - RNA, 21 nt, synthetic construct
  source 1..21: mol_type = other RNA
caggatgaattctgttctcgt

SEQ ID NO: 19630 - RNA, 21 nt, synthetic construct
  source 1..21: mol_type = other RNA
caggattaaaagcagcaaggg

SEQ ID NO: 19631 - RNA, 21 nt, synthetic construct
  source 1..21: mol_type = other RNA
caggcacatctttaaaaatgg

SEQ ID NO: 19632 - RNA, 21 nt, synthetic construct
  source 1..21: mol_type = other RNA
caggcatctgagatcagttac

SEQ ID NO: 19633 - RNA, 21 nt, synthetic construct
  source 1..21: mol_type = other RNA
caggcatcttagcaactctca

SEQ ID NO: 19634 - RNA, 21 nt, synthetic construct
  source 1..21: mol_type = other RNA
caggctacccaagatcaagag

SEQ ID NO: 19635 - RNA, 21 nt, synthetic construct
  source 1..21: mol_type = other RNA
caggctctctacccctttgca

SEQ ID NO: 19636 - RNA, 21 nt, synthetic construct
  source 1..21: mol_type = other RNA
cagggacagaatcccagctaa

SEQ ID NO: 19637 - RNA, 21 nt, synthetic construct
  source 1..21: mol_type = other RNA
cagggaccttatgcatcacat

SEQ ID NO: 19638 - RNA, 21 nt, synthetic construct
  source 1..21: mol_type = other RNA
caggtgaaactccattactgg

SEQ ID NO: 19639 - RNA, 21 nt, synthetic construct
  source 1..21: mol_type = other RNA
caggtgatcatgctttatgtc

SEQ ID NO: 19640 - RNA, 21 nt, synthetic construct
  source 1..21: mol_type = other RNA
caggtgatcttgactactgct

SEQ ID NO: 19641 - RNA, 21 nt, synthetic construct
  source 1..21: mol_type = other RNA
cagtaaaaagagaaaaccatc

SEQ ID NO: 19642 - RNA, 21 nt, synthetic construct
  source 1..21: mol_type = other RNA
cagtaaggaaataaaagctga

SEQ ID NO: 19643 - RNA, 21 nt, synthetic construct
  source 1..21: mol_type = other RNA
cagtaatggagtttcacctgt

SEQ ID NO: 19644 - RNA, 21 nt, synthetic construct
  source 1..21: mol_type = other RNA
cagtacaaactgctcaggagt

SEQ ID NO: 19645 - RNA, 21 nt, synthetic construct
  source 1..21: mol_type = other RNA
cagtacaagccagtaatggag

SEQ ID NO: 19646 - RNA, 21 nt, synthetic construct
  source 1..21: mol_type = other RNA
cagtagtcaagatcacctgga

SEQ ID NO: 19647 - RNA, 21 nt, synthetic construct
  source 1..21: mol_type = other RNA
cagtatagctgtagccccgga

SEQ ID NO: 19648 - RNA, 21 nt, synthetic construct
  source 1..21: mol_type = other RNA
cagtccaggtgatcttgacta

SEQ ID NO: 19649 - RNA, 21 nt, synthetic construct
  source 1..21: mol_type = other RNA
cagtgaaagcaagcgttaatg

SEQ ID NO: 19650 - RNA, 21 nt, synthetic construct
  source 1..21: mol_type = other RNA
cagtgcttccctccctcaccc

SEQ ID NO: 19651 - RNA, 21 nt, synthetic construct
  source 1..21: mol_type = other RNA
cagtgcttttattcctcccta

SEQ ID NO: 19652 - RNA, 21 nt, synthetic construct
  source 1..21: mol_type = other RNA
cagttaaatgaaatgtaatgg

SEQ ID NO: 19653 - RNA, 21 nt, synthetic construct
  source 1..21: mol_type = other RNA
cagttacccaaatcatagaga

SEQ ID NO: 19654 - RNA, 21 nt, synthetic construct
  source 1..21: mol_type = other RNA
cagttactaactggtaagaac

SEQ ID NO: 19655 - RNA, 21 nt, synthetic construct
  source 1..21: mol_type = other RNA
cagttagtaactgatctcaga

SEQ ID NO: 19656 - RNA, 21 nt, synthetic construct
  source 1..21: mol_type = other RNA
cagttcttgcagtgtggccca

SEQ ID NO: 19657 - RNA, 21 nt, synthetic construct
  source 1..21: mol_type = other RNA
cagttctttagtcataccagc

SEQ ID NO: 19658 - RNA, 21 nt, synthetic construct
  source 1..21: mol_type = other RNA
cagtttaatggaatctcacct

SEQ ID NO: 19659 - RNA, 21 nt, synthetic construct
  source 1..21: mol_type = other RNA
cagtttgggtcatagaacaac

SEQ ID NO: 19660 - RNA, 21 nt, synthetic construct
  source 1..21: mol_type = other RNA
cagtttgtactgcgtgggtca

SEQ ID NO: 19661 - RNA, 21 nt, synthetic construct
  source 1..21: mol_type = other RNA
cagttttcttctgactcctga

SEQ ID NO: 19662 - RNA, 21 nt, synthetic construct
  source 1..21: mol_type = other RNA
cataaagacatttacatgtcg

SEQ ID NO: 19663 - RNA, 21 nt, synthetic construct
  source 1..21: mol_type = other RNA
cataaagcatgatcacctgag

SEQ ID NO: 19664 - RNA, 21 nt, synthetic construct
  source 1..21: mol_type = other RNA
cataaggtccctggatagact

SEQ ID NO: 19665 - RNA, 21 nt, synthetic construct
  source 1..21: mol_type = other RNA
cataatgaattttagggaggt

SEQ ID NO: 19666 - RNA, 21 nt, synthetic construct
  source 1..21: mol_type = other RNA
cataccagccacttttccaat

SEQ ID NO: 19667 - RNA, 21 nt, synthetic construct
  source 1..21: mol_type = other RNA
catactacacacacaaatatg

SEQ ID NO: 19668 - RNA, 21 nt, synthetic construct
  source 1..21: mol_type = other RNA
catacttgatcccattttcca

SEQ ID NO: 19669 - RNA, 21 nt, synthetic construct
  source 1..21: mol_type = other RNA
catagaacaacagaccatgga

SEQ ID NO: 19670 - RNA, 21 nt, synthetic construct
  source 1..21: mol_type = other RNA
catagagacgtcatatatctt

SEQ ID NO: 19671 - RNA, 21 nt, synthetic construct
  source 1..21: mol_type = other RNA
catagcactagctttctccct

SEQ ID NO: 19672 - RNA, 21 nt, synthetic construct
  source 1..21: mol_type = other RNA
catagtaattctggggttgtt

SEQ ID NO: 19673 - RNA, 21 nt, synthetic construct
  source 1..21: mol_type = other RNA
catataaaggacagctgatga

SEQ ID NO: 19674 - RNA, 21 nt, synthetic construct
  source 1..21: mol_type = other RNA
catatatctttgtggggtggt

SEQ ID NO: 19675 - RNA, 21 nt, synthetic construct
  source 1..21: mol_type = other RNA
catatcttgagttatagaaaa

SEQ ID NO: 19676 - RNA, 21 nt, synthetic construct
  source 1..21: mol_type = other RNA
catatttgtgtgtgtagtatg

SEQ ID NO: 19677 - RNA, 21 nt, synthetic construct
  source 1..21: mol_type = other RNA
catcaatgtccacgtattctg

SEQ ID NO: 19678 - RNA, 21 nt, synthetic construct
  source 1..21: mol_type = other RNA
catcacattcacgagaacaga

SEQ ID NO: 19679 - RNA, 21 nt, synthetic construct
  source 1..21: mol_type = other RNA
catcagagtatactaggagct

SEQ ID NO: 19680 - RNA, 21 nt, synthetic construct
  source 1..21: mol_type = other RNA
catcagctgtcctttatatgt

SEQ ID NO: 19681 - RNA, 21 nt, synthetic construct
  source 1..21: mol_type = other RNA
catcatatcttgagttataga

SEQ ID NO: 19682 - RNA, 21 nt, synthetic construct
  source 1..21: mol_type = other RNA
catccctaccaggcatcttag

SEQ ID NO: 19683 - RNA, 21 nt, synthetic construct
  source 1..21: mol_type = other RNA
catcctaacaagatgtaagat

SEQ ID NO: 19684 - RNA, 21 nt, synthetic construct
  source 1..21: mol_type = other RNA
catcctgtaaaccaggggtgt

SEQ ID NO: 19685 - RNA, 21 nt, synthetic construct
  source 1..21: mol_type = other RNA
catctcccctttggtcatgcc

SEQ ID NO: 19686 - RNA, 21 nt, synthetic construct
  source 1..21: mol_type = other RNA
catctccctttttcttcctct

SEQ ID NO: 19687 - RNA, 21 nt, synthetic construct
  source 1..21: mol_type = other RNA
catctgagatcagttactaac

SEQ ID NO: 19688 - RNA, 21 nt, synthetic construct
  source 1..21: mol_type = other RNA
catcttacatcttgttaggat

SEQ ID NO: 19689 - RNA, 21 nt, synthetic construct
  source 1..21: mol_type = other RNA
catcttagcaactctcactca

SEQ ID NO: 19690 - RNA, 21 nt, synthetic construct
  source 1..21: mol_type = other RNA
catcttgttaggatgattgtc

SEQ ID NO: 19691 - RNA, 21 nt, synthetic construct
  source 1..21: mol_type = other RNA
catctttaaaaatggtttgtt

SEQ ID NO: 19692 - RNA, 21 nt, synthetic construct
  source 1..21: mol_type = other RNA
catgaaaatgacaggtgaaac

SEQ ID NO: 19693 - RNA, 21 nt, synthetic construct
  source 1..21: mol_type = other RNA
catgaccaaaggggagatgac

SEQ ID NO: 19694 - RNA, 21 nt, synthetic construct
  source 1..21: mol_type = other RNA
catgatcacctgagttttata

SEQ ID NO: 19695 - RNA, 21 nt, synthetic construct
  source 1..21: mol_type = other RNA
catgccttccatggtctgttg

SEQ ID NO: 19696 - RNA, 21 nt, synthetic construct
  source 1..21: mol_type = other RNA
catgcggcccgcgggttagac

SEQ ID NO: 19697 - RNA, 21 nt, synthetic construct
  source 1..21: mol_type = other RNA
catgctctatcttcctttagg

SEQ ID NO: 19698 - RNA, 21 nt, synthetic construct
  source 1..21: mol_type = other RNA
catgctttatgtctgtctcta

SEQ ID NO: 19699 - RNA, 21 nt, synthetic construct
  source 1..21: mol_type = other RNA
catggaaggcatgaccaaagg

SEQ ID NO: 19700 - RNA, 21 nt, synthetic construct
  source 1..21: mol_type = other RNA
catggaatgaattgcagttac

SEQ ID NO: 19701 - RNA, 21 nt, synthetic construct
  source 1..21: mol_type = other RNA
catgggacccaggacagcttt

SEQ ID NO: 19702 - RNA, 21 nt, synthetic construct
  source 1..21: mol_type = other RNA
catggtctgttgttctatgac

SEQ ID NO: 19703 - RNA, 21 nt, synthetic construct
  source 1..21: mol_type = other RNA
catgtaaatgtctttatggtt

SEQ ID NO: 19704 - RNA, 21 nt, synthetic construct
  source 1..21: mol_type = other RNA
catgtcgctcactccatttac

SEQ ID NO: 19705 - RNA, 21 nt, synthetic construct
  source 1..21: mol_type = other RNA
catgtgacttcaggagagagg

SEQ ID NO: 19706 - RNA, 21 nt, synthetic construct
  source 1..21: mol_type = other RNA
cattaaactgttacaggagct

SEQ ID NO: 19707 - RNA, 21 nt, synthetic construct
  source 1..21: mol_type = other RNA
cattaacgcttgctttcactg

SEQ ID NO: 19708 - RNA, 21 nt, synthetic construct
  source 1..21: mol_type = other RNA
cattacatttcatttaactgc

SEQ ID NO: 19709 - RNA, 21 nt, synthetic construct
  source 1..21: mol_type = other RNA
cattactggcttgtactgttt

SEQ ID NO: 19710 - RNA, 21 nt, synthetic construct
  source 1..21: mol_type = other RNA
cattcaaagctgtcctgggtc

SEQ ID NO: 19711 - RNA, 21 nt, synthetic construct
  source 1..21: mol_type = other RNA
cattcacgagaacagaattca

SEQ ID NO: 19712 - RNA, 21 nt, synthetic construct
  source 1..21: mol_type = other RNA
cattccaaaaagaaccacccc

SEQ ID NO: 19713 - RNA, 21 nt, synthetic construct
  source 1..21: mol_type = other RNA
cattccatgtgacttcaggag

SEQ ID NO: 19714 - RNA, 21 nt, synthetic construct
  source 1..21: mol_type = other RNA
cattgatggttttctcttttt

SEQ ID NO: 19715 - RNA, 21 nt, synthetic construct
  source 1..21: mol_type = other RNA
cattggaaaagtggctggtat

SEQ ID NO: 19716 - RNA, 21 nt, synthetic construct
  source 1..21: mol_type = other RNA
catttaagaacgtgaactagg

SEQ ID NO: 19717 - RNA, 21 nt, synthetic construct
  source 1..21: mol_type = other RNA
catttacatgtcgctcactcc

SEQ ID NO: 19718 - RNA, 21 nt, synthetic construct
  source 1..21: mol_type = other RNA
catttacttaaagttggctag

SEQ ID NO: 19719 - RNA, 21 nt, synthetic construct
  source 1..21: mol_type = other RNA
catttctgttcttaccagtta

SEQ ID NO: 19720 - RNA, 21 nt, synthetic construct
  source 1..21: mol_type = other RNA
catttgaatctgcaggattaa

SEQ ID NO: 19721 - RNA, 21 nt, synthetic construct
  source 1..21: mol_type = other RNA
catttgagacccttgctgcac

SEQ ID NO: 19722 - RNA, 21 nt, synthetic construct
  source 1..21: mol_type = other RNA
catttgtatcacacagaccta

SEQ ID NO: 19723 - RNA, 21 nt, synthetic construct
  source 1..21: mol_type = other RNA
catttgttgtacttgctcctc

SEQ ID NO: 19724 - RNA, 21 nt, synthetic construct
  source 1..21: mol_type = other RNA
cattttatcctttttccttag

SEQ ID NO: 19725 - RNA, 21 nt, synthetic construct
  source 1..21: mol_type = other RNA
cattttattaatcttgagcat

SEQ ID NO: 19726 - RNA, 21 nt, synthetic construct
  source 1..21: mol_type = other RNA
cattttcatgctctatcttcc

SEQ ID NO: 19727 - RNA, 21 nt, synthetic construct
  source 1..21: mol_type = other RNA
cattttccatttgttgtactt

SEQ ID NO: 19728 - RNA, 21 nt, synthetic construct
  source 1..21: mol_type = other RNA
catttttaaagatgtgcctgc

SEQ ID NO: 19729 - RNA, 21 nt, synthetic construct
  source 1..21: mol_type = other RNA
catttttcactattttccaca

SEQ ID NO: 19730 - RNA, 21 nt, synthetic construct
  source 1..21: mol_type = other RNA
catttttctagagacagacat

SEQ ID NO: 19731 - RNA, 21 nt, synthetic construct
  source 1..21: mol_type = other RNA
catttttggagcatttttcta

SEQ ID NO: 19732 - RNA, 21 nt, synthetic construct
  source 1..21: mol_type = other RNA
ccaaaaagaaccaccccacaa

SEQ ID NO: 19733 - RNA, 21 nt, synthetic construct
  source 1..21: mol_type = other RNA
ccaaaaatgataagtagtgat

SEQ ID NO: 19734 - RNA, 21 nt, synthetic construct
  source 1..21: mol_type = other RNA
ccaaactcattaacgcttgct

SEQ ID NO: 19735 - RNA, 21 nt, synthetic construct
  source 1..21: mol_type = other RNA
ccaaactgcccttttaaaaaa

SEQ ID NO: 19736 - RNA, 21 nt, synthetic construct
  source 1..21: mol_type = other RNA
ccaaaggggagatgacatttg

SEQ ID NO: 19737 - RNA, 21 nt, synthetic construct
  source 1..21: mol_type = other RNA
ccaaagtgtagcatcaggtta

SEQ ID NO: 19738 - RNA, 21 nt, synthetic construct
  source 1..21: mol_type = other RNA
ccaaatcatagagacgtcata

SEQ ID NO: 19739 - RNA, 21 nt, synthetic construct
  source 1..21: mol_type = other RNA
ccaaatgctttttatattgct

SEQ ID NO: 19740 - RNA, 21 nt, synthetic construct
  source 1..21: mol_type = other RNA
ccaaattgctgtctctgtctt

SEQ ID NO: 19741 - RNA, 21 nt, synthetic construct
  source 1..21: mol_type = other RNA
ccaacaaaccatttttaaaga

SEQ ID NO: 19742 - RNA, 21 nt, synthetic construct
  source 1..21: mol_type = other RNA
ccaacattttaacaccaaatg

SEQ ID NO: 19743 - RNA, 21 nt, synthetic construct
  source 1..21: mol_type = other RNA
ccaactttaagtaaatggagt

SEQ ID NO: 19744 - RNA, 21 nt, synthetic construct
  source 1..21: mol_type = other RNA
ccaagacagttcttgcagtgt

SEQ ID NO: 19745 - RNA, 21 nt, synthetic construct
  source 1..21: mol_type = other RNA
ccaagatcaagagagggagaa

SEQ ID NO: 19746 - RNA, 21 nt, synthetic construct
  source 1..21: mol_type = other RNA
ccaaggcaggcacatctttaa

SEQ ID NO: 19747 - RNA, 21 nt, synthetic construct
  source 1..21: mol_type = other RNA
ccaatcaagtgtttccaggaa

SEQ ID NO: 19748 - RNA, 21 nt, synthetic construct
  source 1..21: mol_type = other RNA
ccaatctgtctggtttcgcga

SEQ ID NO: 19749 - RNA, 21 nt, synthetic construct
  source 1..21: mol_type = other RNA
ccaatgctcaagattaataaa

SEQ ID NO: 19750 - RNA, 21 nt, synthetic construct
  source 1..21: mol_type = other RNA
ccaattctctgtaaagcagta

SEQ ID NO: 19751 - RNA, 21 nt, synthetic construct
  source 1..21: mol_type = other RNA
ccacaaagatatatgacgtct

SEQ ID NO: 19752 - RNA, 21 nt, synthetic construct
  source 1..21: mol_type = other RNA
ccacaaattaaggcttgagct

SEQ ID NO: 19753 - RNA, 21 nt, synthetic construct
  source 1..21: mol_type = other RNA
ccacactgcaagaactgtctt

SEQ ID NO: 19754 - RNA, 21 nt, synthetic construct
  source 1..21: mol_type = other RNA
ccacagaacaagtccggggct

SEQ ID NO: 19755 - RNA, 21 nt, synthetic construct
  source 1..21: mol_type = other RNA
ccacagttgcaattcaaatta

SEQ ID NO: 19756 - RNA, 21 nt, synthetic construct
  source 1..21: mol_type = other RNA
ccacatactacacacacaaat

SEQ ID NO: 19757 - RNA, 21 nt, synthetic construct
  source 1..21: mol_type = other RNA
ccacatataaaggacagctga

SEQ ID NO: 19758 - RNA, 21 nt, synthetic construct
  source 1..21: mol_type = other RNA
ccaccaaagtgtagcatcagg

SEQ ID NO: 19759 - RNA, 21 nt, synthetic construct
  source 1..21: mol_type = other RNA
ccaccacaaattaaggcttga

SEQ ID NO: 19760 - RNA, 21 nt, synthetic construct
  source 1..21: mol_type = other RNA
ccaccccacaaagatatatga

SEQ ID NO: 19761 - RNA, 21 nt, synthetic construct
  source 1..21: mol_type = other RNA
ccacgcagtacaaactgctca

SEQ ID NO: 19762 - RNA, 21 nt, synthetic construct
  source 1..21: mol_type = other RNA
ccacgtattctgtaatccaca

SEQ ID NO: 19763 - RNA, 21 nt, synthetic construct
  source 1..21: mol_type = other RNA
ccacttttccaatgctcaaga

SEQ ID NO: 19764 - RNA, 21 nt, synthetic construct
  source 1..21: mol_type = other RNA
ccagaattactatgacccacg

SEQ ID NO: 19765 - RNA, 21 nt, synthetic construct
  source 1..21: mol_type = other RNA
ccagacagattggttccacca

SEQ ID NO: 19766 - RNA, 21 nt, synthetic construct
  source 1..21: mol_type = other RNA
ccagagagcttcagcttttat

SEQ ID NO: 19767 - RNA, 21 nt, synthetic construct
  source 1..21: mol_type = other RNA
ccagcagtgcttttattcctc

SEQ ID NO: 19768 - RNA, 21 nt, synthetic construct
  source 1..21: mol_type = other RNA
ccagccacttttccaatgctc

SEQ ID NO: 19769 - RNA, 21 nt, synthetic construct
  source 1..21: mol_type = other RNA
ccagcctaaatttctgtccta

SEQ ID NO: 19770 - RNA, 21 nt, synthetic construct
  source 1..21: mol_type = other RNA
ccagctaaggaaaaaggataa

SEQ ID NO: 19771 - RNA, 21 nt, synthetic construct
  source 1..21: mol_type = other RNA
ccagctcaagccttaatttgt

SEQ ID NO: 19772 - RNA, 21 nt, synthetic construct
  source 1..21: mol_type = other RNA
ccaggaagtgaaaacttgtag

SEQ ID NO: 19773 - RNA, 21 nt, synthetic construct
  source 1..21: mol_type = other RNA
ccaggcatcttagcaactctc

SEQ ID NO: 19774 - RNA, 21 nt, synthetic construct
  source 1..21: mol_type = other RNA
ccaggctacccaagatcaaga

SEQ ID NO: 19775 - RNA, 21 nt, synthetic construct
  source 1..21: mol_type = other RNA
ccaggctctctacccctttgc

SEQ ID NO: 19776 - RNA, 21 nt, synthetic construct
  source 1..21: mol_type = other RNA
ccagggaccttatgcatcaca

SEQ ID NO: 19777 - RNA, 21 nt, synthetic construct
  source 1..21: mol_type = other RNA
ccaggtgatcttgactactgc

SEQ ID NO: 19778 - RNA, 21 nt, synthetic construct
  source 1..21: mol_type = other RNA
ccagtaatggagtttcacctg

SEQ ID NO: 19779 - RNA, 21 nt, synthetic construct
  source 1..21: mol_type = other RNA
ccagtgcttccctccctcacc

SEQ ID NO: 19780 - RNA, 21 nt, synthetic construct
  source 1..21: mol_type = other RNA
ccagttagtaactgatctcag

SEQ ID NO: 19781 - RNA, 21 nt, synthetic construct
  source 1..21: mol_type = other RNA
ccataaagacatttacatgtc

SEQ ID NO: 19782 - RNA, 21 nt, synthetic construct
  source 1..21: mol_type = other RNA
ccatcaatgtccacgtattct

SEQ ID NO: 19783 - RNA, 21 nt, synthetic construct
  source 1..21: mol_type = other RNA
ccatcttacatcttgttagga

SEQ ID NO: 19784 - RNA, 21 nt, synthetic construct
  source 1..21: mol_type = other RNA
ccatgcggcccgcgggttaga

SEQ ID NO: 19785 - RNA, 21 nt, synthetic construct
  source 1..21: mol_type = other RNA
ccatggaaggcatgaccaaag

SEQ ID NO: 19786 - RNA, 21 nt, synthetic construct
  source 1..21: mol_type = other RNA
ccatggtctgttgttctatga

SEQ ID NO: 19787 - RNA, 21 nt, synthetic construct
  source 1..21: mol_type = other RNA
ccatgtgacttcaggagagag

SEQ ID NO: 19788 - RNA, 21 nt, synthetic construct
  source 1..21: mol_type = other RNA
ccattaaactgttacaggagc

SEQ ID NO: 19789 - RNA, 21 nt, synthetic construct
  source 1..21: mol_type = other RNA
ccattacatttcatttaactg

SEQ ID NO: 19790 - RNA, 21 nt, synthetic construct
  source 1..21: mol_type = other RNA
ccattactggcttgtactgtt

SEQ ID NO: 19791 - RNA, 21 nt, synthetic construct
  source 1..21: mol_type = other RNA
ccatttacttaaagttggcta

SEQ ID NO: 19792 - RNA, 21 nt, synthetic construct
  source 1..21: mol_type = other RNA
ccatttgagacccttgctgca

SEQ ID NO: 19793 - RNA, 21 nt, synthetic construct
  source 1..21: mol_type = other RNA
ccatttgttgtacttgctcct

SEQ ID NO: 19794 - RNA, 21 nt, synthetic construct
  source 1..21: mol_type = other RNA
ccattttccatttgttgtact

SEQ ID NO: 19795 - RNA, 21 nt, synthetic construct
  source 1..21: mol_type = other RNA
ccatttttaaagatgtgcctg

SEQ ID NO: 19796 - RNA, 21 nt, synthetic construct
  source 1..21: mol_type = other RNA
cccaaactgcccttttaaaaa

SEQ ID NO: 19797 - RNA, 21 nt, synthetic construct
  source 1..21: mol_type = other RNA
cccaaatcatagagacgtcat

SEQ ID NO: 19798 - RNA, 21 nt, synthetic construct
  source 1..21: mol_type = other RNA
cccaagacagttcttgcagtg

SEQ ID NO: 19799 - RNA, 21 nt, synthetic construct
  source 1..21: mol_type = other RNA
cccaagatcaagagagggaga

SEQ ID NO: 19800 - RNA, 21 nt, synthetic construct
  source 1..21: mol_type = other RNA
cccacaaagatatatgacgtc

SEQ ID NO: 19801 - RNA, 21 nt, synthetic construct
  source 1..21: mol_type = other RNA
cccacgcagtacaaactgctc

SEQ ID NO: 19802 - RNA, 21 nt, synthetic construct
  source 1..21: mol_type = other RNA
cccagaattactatgacccac

SEQ ID NO: 19803 - RNA, 21 nt, synthetic construct
  source 1..21: mol_type = other RNA
cccagcagtgcttttattcct

SEQ ID NO: 19804 - RNA, 21 nt, synthetic construct
  source 1..21: mol_type = other RNA
cccagcctaaatttctgtcct

SEQ ID NO: 19805 - RNA, 21 nt, synthetic construct
  source 1..21: mol_type = other RNA
cccagctaaggaaaaaggata

SEQ ID NO: 19806 - RNA, 21 nt, synthetic construct
  source 1..21: mol_type = other RNA
cccagctcaagccttaatttg

SEQ ID NO: 19807 - RNA, 21 nt, synthetic construct
  source 1..21: mol_type = other RNA
cccaggctctctacccctttg

SEQ ID NO: 19808 - RNA, 21 nt, synthetic construct
  source 1..21: mol_type = other RNA
cccatgcggcccgcgggttag

SEQ ID NO: 19809 - RNA, 21 nt, synthetic construct
  source 1..21: mol_type = other RNA
cccattacatttcatttaact

SEQ ID NO: 19810 - RNA, 21 nt, synthetic construct
  source 1..21: mol_type = other RNA
cccattttccatttgttgtac

SEQ ID NO: 19811 - RNA, 21 nt, synthetic construct
  source 1..21: mol_type = other RNA
ccccacaaagatatatgacgt

SEQ ID NO: 19812 - RNA, 21 nt, synthetic construct
  source 1..21: mol_type = other RNA
ccccagaattactatgaccca

SEQ ID NO: 19813 - RNA, 21 nt, synthetic construct
  source 1..21: mol_type = other RNA
ccccagctcaagccttaattt

SEQ ID NO: 19814 - RNA, 21 nt, synthetic construct
  source 1..21: mol_type = other RNA
ccccaggctctctaccccttt

SEQ ID NO: 19815 - RNA, 21 nt, synthetic construct
  source 1..21: mol_type = other RNA
ccccggacttgttctgtggat

SEQ ID NO: 19816 - RNA, 21 nt, synthetic construct
  source 1..21: mol_type = other RNA
cccctggtttacaggatgaat

SEQ ID NO: 19817 - RNA, 21 nt, synthetic construct
  source 1..21: mol_type = other RNA
cccctttgcatccctaccagg

SEQ ID NO: 19818 - RNA, 21 nt, synthetic construct
  source 1..21: mol_type = other RNA
cccctttggtcatgccttcca

SEQ ID NO: 19819 - RNA, 21 nt, synthetic construct
  source 1..21: mol_type = other RNA
cccgcgggccgcatgggaccc

SEQ ID NO: 19820 - RNA, 21 nt, synthetic construct
  source 1..21: mol_type = other RNA
cccgcgggttagacaacttgc

SEQ ID NO: 19821 - RNA, 21 nt, synthetic construct
  source 1..21: mol_type = other RNA
cccggacttgttctgtggatt

SEQ ID NO: 19822 - RNA, 21 nt, synthetic construct
  source 1..21: mol_type = other RNA
ccctaccaggcatcttagcaa

SEQ ID NO: 19823 - RNA, 21 nt, synthetic construct
  source 1..21: mol_type = other RNA
ccctagttcacgttcttaaat

SEQ ID NO: 19824 - RNA, 21 nt, synthetic construct
  source 1..21: mol_type = other RNA
ccctcaccctctctccccagg

SEQ ID NO: 19825 - RNA, 21 nt, synthetic construct
  source 1..21: mol_type = other RNA
ccctccctcaccctctctccc

SEQ ID NO: 19826 - RNA, 21 nt, synthetic construct
  source 1..21: mol_type = other RNA
ccctctctccccaggctctct

SEQ ID NO: 19827 - RNA, 21 nt, synthetic construct
  source 1..21: mol_type = other RNA
ccctctcttgatcttgggtag

SEQ ID NO: 19828 - RNA, 21 nt, synthetic construct
  source 1..21: mol_type = other RNA
ccctgaccgtcttcacagtcc

SEQ ID NO: 19829 - RNA, 21 nt, synthetic construct
  source 1..21: mol_type = other RNA
ccctggatagactttcctcaa

SEQ ID NO: 19830 - RNA, 21 nt, synthetic construct
  source 1..21: mol_type = other RNA
ccctgggccacactgcaagaa

SEQ ID NO: 19831 - RNA, 21 nt, synthetic construct
  source 1..21: mol_type = other RNA
ccctggtttacaggatgaatt

SEQ ID NO: 19832 - RNA, 21 nt, synthetic construct
  source 1..21: mol_type = other RNA
cccttgctgcaccaccaaagt

SEQ ID NO: 19833 - RNA, 21 nt, synthetic construct
  source 1..21: mol_type = other RNA
cccttgctgcttttaatcctg

SEQ ID NO: 19834 - RNA, 21 nt, synthetic construct
  source 1..21: mol_type = other RNA
ccctttgcatccctaccaggc

SEQ ID NO: 19835 - RNA, 21 nt, synthetic construct
  source 1..21: mol_type = other RNA
ccctttggtcatgccttccat

SEQ ID NO: 19836 - RNA, 21 nt, synthetic construct
  source 1..21: mol_type = other RNA
cccttttaaaaaagcagtttt

SEQ ID NO: 19837 - RNA, 21 nt, synthetic construct
  source 1..21: mol_type = other RNA
ccctttttcttcctctaaata

SEQ ID NO: 19838 - RNA, 21 nt, synthetic construct
  source 1..21: mol_type = other RNA
ccgaaagattggacacccctg

SEQ ID NO: 19839 - RNA, 21 nt, synthetic construct
  source 1..21: mol_type = other RNA
ccgcatgggacccaggacagc

SEQ ID NO: 19840 - RNA, 21 nt, synthetic construct
  source 1..21: mol_type = other RNA
ccgcgggccgcatgggaccca

SEQ ID NO: 19841 - RNA, 21 nt, synthetic construct
  source 1..21: mol_type = other RNA
ccgcgggttagacaacttgct

SEQ ID NO: 19842 - RNA, 21 nt, synthetic construct
  source 1..21: mol_type = other RNA
ccggacttgttctgtggatta

SEQ ID NO: 19843 - RNA, 21 nt, synthetic construct
  source 1..21: mol_type = other RNA
ccggggctacagctatactgt

SEQ ID NO: 19844 - RNA, 21 nt, synthetic construct
  source 1..21: mol_type = other RNA
ccgtcttcacagtccaggtga

SEQ ID NO: 19845 - RNA, 21 nt, synthetic construct
  source 1..21: mol_type = other RNA
cctaaaggaagatagagcatg

SEQ ID NO: 19846 - RNA, 21 nt, synthetic construct
  source 1..21: mol_type = other RNA
cctaaatttctgtcctacaag

SEQ ID NO: 19847 - RNA, 21 nt, synthetic construct
  source 1..21: mol_type = other RNA
cctaacaagatgtaagatgga

SEQ ID NO: 19848 - RNA, 21 nt, synthetic construct
  source 1..21: mol_type = other RNA
cctaacctcagatccaattct

SEQ ID NO: 19849 - RNA, 21 nt, synthetic construct
  source 1..21: mol_type = other RNA
cctacaagttttcacttcctg

SEQ ID NO: 19850 - RNA, 21 nt, synthetic construct
  source 1..21: mol_type = other RNA
cctaccaggcatcttagcaac

SEQ ID NO: 19851 - RNA, 21 nt, synthetic construct
  source 1..21: mol_type = other RNA
cctagtatactctgatgtcta

SEQ ID NO: 19852 - RNA, 21 nt, synthetic construct
  source 1..21: mol_type = other RNA
cctagttcacgttcttaaatg

SEQ ID NO: 19853 - RNA, 21 nt, synthetic construct
  source 1..21: mol_type = other RNA
cctattcttcattcaagttct

SEQ ID NO: 19854 - RNA, 21 nt, synthetic construct
  source 1..21: mol_type = other RNA
cctcaatttaacagctttttc

SEQ ID NO: 19855 - RNA, 21 nt, synthetic construct
  source 1..21: mol_type = other RNA
cctcaccctctctccccaggc

SEQ ID NO: 19856 - RNA, 21 nt, synthetic construct
  source 1..21: mol_type = other RNA
cctcagatccaattctctgta

SEQ ID NO: 19857 - RNA, 21 nt, synthetic construct
  source 1..21: mol_type = other RNA
cctcaggataaaacttacttt

SEQ ID NO: 19858 - RNA, 21 nt, synthetic construct
  source 1..21: mol_type = other RNA
cctccaatcaagtgtttccag

SEQ ID NO: 19859 - RNA, 21 nt, synthetic construct
  source 1..21: mol_type = other RNA
cctccctagttcacgttctta

SEQ ID NO: 19860 - RNA, 21 nt, synthetic construct
  source 1..21: mol_type = other RNA
cctccctcaccctctctcccc

SEQ ID NO: 19861 - RNA, 21 nt, synthetic construct
  source 1..21: mol_type = other RNA
cctctaaatacctctcatttc

SEQ ID NO: 19862 - RNA, 21 nt, synthetic construct
  source 1..21: mol_type = other RNA
cctctagtattcagacatagc

SEQ ID NO: 19863 - RNA, 21 nt, synthetic construct
  source 1..21: mol_type = other RNA
cctctcatttctgttcttacc

SEQ ID NO: 19864 - RNA, 21 nt, synthetic construct
  source 1..21: mol_type = other RNA
cctctctccccaggctctcta

SEQ ID NO: 19865 - RNA, 21 nt, synthetic construct
  source 1..21: mol_type = other RNA
cctctctcctgaagtcacatg

SEQ ID NO: 19866 - RNA, 21 nt, synthetic construct
  source 1..21: mol_type = other RNA
cctctcttgatcttgggtagc

SEQ ID NO: 19867 - RNA, 21 nt, synthetic construct
  source 1..21: mol_type = other RNA
cctgaagtcacatggaatgaa

SEQ ID NO: 19868 - RNA, 21 nt, synthetic construct
  source 1..21: mol_type = other RNA
cctgaccgtcttcacagtcca

SEQ ID NO: 19869 - RNA, 21 nt, synthetic construct
  source 1..21: mol_type = other RNA
cctgagcagtttgtactgcgt

SEQ ID NO: 19870 - RNA, 21 nt, synthetic construct
  source 1..21: mol_type = other RNA
cctgagctcctagtatactct

SEQ ID NO: 19871 - RNA, 21 nt, synthetic construct
  source 1..21: mol_type = other RNA
cctgaggaattataataccaa

SEQ ID NO: 19872 - RNA, 21 nt, synthetic construct
  source 1..21: mol_type = other RNA
cctgagttttataccatttga

SEQ ID NO: 19873 - RNA, 21 nt, synthetic construct
  source 1..21: mol_type = other RNA
cctgatgctacactttggtgg

SEQ ID NO: 19874 - RNA, 21 nt, synthetic construct
  source 1..21: mol_type = other RNA
cctgcagattcaaatgtcatc

SEQ ID NO: 19875 - RNA, 21 nt, synthetic construct
  source 1..21: mol_type = other RNA
cctgccttggacaacagtgaa

SEQ ID NO: 19876 - RNA, 21 nt, synthetic construct
  source 1..21: mol_type = other RNA
cctggaaacacttgattggag

SEQ ID NO: 19877 - RNA, 21 nt, synthetic construct
  source 1..21: mol_type = other RNA
cctggactgtgaagacggtca

SEQ ID NO: 19878 - RNA, 21 nt, synthetic construct
  source 1..21: mol_type = other RNA
cctggatagactttcctcaat

SEQ ID NO: 19879 - RNA, 21 nt, synthetic construct
  source 1..21: mol_type = other RNA
cctgggccacactgcaagaac

SEQ ID NO: 19880 - RNA, 21 nt, synthetic construct
  source 1..21: mol_type = other RNA
cctggggagagagggtgaggg

SEQ ID NO: 19881 - RNA, 21 nt, synthetic construct
  source 1..21: mol_type = other RNA
cctgggtcccatgcggcccgc

SEQ ID NO: 19882 - RNA, 21 nt, synthetic construct
  source 1..21: mol_type = other RNA
cctggtagggatgcaaagggg

SEQ ID NO: 19883 - RNA, 21 nt, synthetic construct
  source 1..21: mol_type = other RNA
cctggtgtctcgcgaaaccag

SEQ ID NO: 19884 - RNA, 21 nt, synthetic construct
  source 1..21: mol_type = other RNA
cctggtttacaggatgaattc

SEQ ID NO: 19885 - RNA, 21 nt, synthetic construct
  source 1..21: mol_type = other RNA
cctgtaaaccaggggtgtcca

SEQ ID NO: 19886 - RNA, 21 nt, synthetic construct
  source 1..21: mol_type = other RNA
cctgtaacagtttaatggaat

SEQ ID NO: 19887 - RNA, 21 nt, synthetic construct
  source 1..21: mol_type = other RNA
cctgtcattttcatgctctat

SEQ ID NO: 19888 - RNA, 21 nt, synthetic construct
  source 1..21: mol_type = other RNA
cctgtgtgatagcttccaaat

SEQ ID NO: 19889 - RNA, 21 nt, synthetic construct
  source 1..21: mol_type = other RNA
ccttaactattctgagctttt

SEQ ID NO: 19890 - RNA, 21 nt, synthetic construct
  source 1..21: mol_type = other RNA
ccttaatttgtggtggaacca

SEQ ID NO: 19891 - RNA, 21 nt, synthetic construct
  source 1..21: mol_type = other RNA
ccttactgctcagtaaaaaga

SEQ ID NO: 19892 - RNA, 21 nt, synthetic construct
  source 1..21: mol_type = other RNA
ccttagctgggattctgtccc

SEQ ID NO: 19893 - RNA, 21 nt, synthetic construct
  source 1..21: mol_type = other RNA
ccttatgcatcacattcacga

SEQ ID NO: 19894 - RNA, 21 nt, synthetic construct
  source 1..21: mol_type = other RNA
ccttcaaaaagctcagaatag

SEQ ID NO: 19895 - RNA, 21 nt, synthetic construct
  source 1..21: mol_type = other RNA
ccttccatggtctgttgttct

SEQ ID NO: 19896 - RNA, 21 nt, synthetic construct
  source 1..21: mol_type = other RNA
ccttgctgcaccaccaaagtg

SEQ ID NO: 19897 - RNA, 21 nt, synthetic construct
  source 1..21: mol_type = other RNA
ccttgctgcttttaatcctgc

SEQ ID NO: 19898 - RNA, 21 nt, synthetic construct
  source 1..21: mol_type = other RNA
ccttggacaacagtgaaagca

SEQ ID NO: 19899 - RNA, 21 nt, synthetic construct
  source 1..21: mol_type = other RNA
cctttaggacaatcatcctaa

SEQ ID NO: 19900 - RNA, 21 nt, synthetic construct
  source 1..21: mol_type = other RNA
cctttatatgtggcccaagac

SEQ ID NO: 19901 - RNA, 21 nt, synthetic construct
  source 1..21: mol_type = other RNA
cctttgcatccctaccaggca

SEQ ID NO: 19902 - RNA, 21 nt, synthetic construct
  source 1..21: mol_type = other RNA
cctttggtcatgccttccatg

SEQ ID NO: 19903 - RNA, 21 nt, synthetic construct
  source 1..21: mol_type = other RNA
ccttttaaaaaagcagttttc

SEQ ID NO: 19904 - RNA, 21 nt, synthetic construct
  source 1..21: mol_type = other RNA
cctttttccttagctgggatt

SEQ ID NO: 19905 - RNA, 21 nt, synthetic construct
  source 1..21: mol_type = other RNA
cctttttcttcctctaaatac

SEQ ID NO: 19906 - RNA, 21 nt, synthetic construct
  source 1..21: mol_type = other RNA
cgaaaccagacagattggttc

SEQ ID NO: 19907 - RNA, 21 nt, synthetic construct
  source 1..21: mol_type = other RNA
cgaaagattggacacccctgg

SEQ ID NO: 19908 - RNA, 21 nt, synthetic construct
  source 1..21: mol_type = other RNA
cgacatgtaaatgtctttatg

SEQ ID NO: 19909 - RNA, 21 nt, synthetic construct
  source 1..21: mol_type = other RNA
cgagaacagaattcatcctgt

SEQ ID NO: 19910 - RNA, 21 nt, synthetic construct
  source 1..21: mol_type = other RNA
cgagacaccaggctacccaag

SEQ ID NO: 19911 - RNA, 21 nt, synthetic construct
  source 1..21: mol_type = other RNA
cgagactgcggattatcacta

SEQ ID NO: 19912 - RNA, 21 nt, synthetic construct
  source 1..21: mol_type = other RNA
cgcagtacaaactgctcagga

SEQ ID NO: 19913 - RNA, 21 nt, synthetic construct
  source 1..21: mol_type = other RNA
cgcatgggacccaggacagct

SEQ ID NO: 19914 - RNA, 21 nt, synthetic construct
  source 1..21: mol_type = other RNA
cgcattcaaagctgtcctggg

SEQ ID NO: 19915 - RNA, 21 nt, synthetic construct
  source 1..21: mol_type = other RNA
cgcgaaaccagacagattggt

SEQ ID NO: 19916 - RNA, 21 nt, synthetic construct
  source 1..21: mol_type = other RNA
cgcgagacaccaggctaccca

SEQ ID NO: 19917 - RNA, 21 nt, synthetic construct
  source 1..21: mol_type = other RNA
cgcgggccgcatgggacccag

SEQ ID NO: 19918 - RNA, 21 nt, synthetic construct
  source 1..21: mol_type = other RNA
cgcgggttagacaacttgctg

SEQ ID NO: 19919 - RNA, 21 nt, synthetic construct
  source 1..21: mol_type = other RNA
cgctcactccatttacttaaa

SEQ ID NO: 19920 - RNA, 21 nt, synthetic construct
  source 1..21: mol_type = other RNA
cgcttgctttcactgttgtcc

SEQ ID NO: 19921 - RNA, 21 nt, synthetic construct
  source 1..21: mol_type = other RNA
cggacttgttctgtggattac

SEQ ID NO: 19922 - RNA, 21 nt, synthetic construct
  source 1..21: mol_type = other RNA
cggattatcactacttatcat

SEQ ID NO: 19923 - RNA, 21 nt, synthetic construct
  source 1..21: mol_type = other RNA
cggcccgcgggttagacaact

SEQ ID NO: 19924 - RNA, 21 nt, synthetic construct
  source 1..21: mol_type = other RNA
cggcttccctgggccacactg

SEQ ID NO: 19925 - RNA, 21 nt, synthetic construct
  source 1..21: mol_type = other RNA
cgggccgcatgggacccagga

SEQ ID NO: 19926 - RNA, 21 nt, synthetic construct
  source 1..21: mol_type = other RNA
cggggctacagctatactgtc

SEQ ID NO: 19927 - RNA, 21 nt, synthetic construct
  source 1..21: mol_type = other RNA
cgggttagacaacttgctgta

SEQ ID NO: 19928 - RNA, 21 nt, synthetic construct
  source 1..21: mol_type = other RNA
cggtcagggacagaatcccag

SEQ ID NO: 19929 - RNA, 21 nt, synthetic construct
  source 1..21: mol_type = other RNA
cgtaaactttcttaaagtttt

SEQ ID NO: 19930 - RNA, 21 nt, synthetic construct
  source 1..21: mol_type = other RNA
cgtattctgtaatccacagaa

SEQ ID NO: 19931 - RNA, 21 nt, synthetic construct
  source 1..21: mol_type = other RNA
cgtcatatatctttgtggggt

SEQ ID NO: 19932 - RNA, 21 nt, synthetic construct
  source 1..21: mol_type = other RNA
cgtctctatgatttgggtaac

SEQ ID NO: 19933 - RNA, 21 nt, synthetic construct
  source 1..21: mol_type = other RNA
cgtcttcacagtccaggtgat

SEQ ID NO: 19934 - RNA, 21 nt, synthetic construct
  source 1..21: mol_type = other RNA
cgtgaactagggaggaataaa

SEQ ID NO: 19935 - RNA, 21 nt, synthetic construct
  source 1..21: mol_type = other RNA
cgtgaatgtgatgcataaggt

SEQ ID NO: 19936 - RNA, 21 nt, synthetic construct
  source 1..21: mol_type = other RNA
cgtggacattgatggttttct

SEQ ID NO: 19937 - RNA, 21 nt, synthetic construct
  source 1..21: mol_type = other RNA
cgtgggtcatagtaattctgg

SEQ ID NO: 19938 - RNA, 21 nt, synthetic construct
  source 1..21: mol_type = other RNA
ctaaagacagagacagcaatt

SEQ ID NO: 19939 - RNA, 21 nt, synthetic construct
  source 1..21: mol_type = other RNA
ctaaaggaagatagagcatga

SEQ ID NO: 19940 - RNA, 21 nt, synthetic construct
  source 1..21: mol_type = other RNA
ctaaatacctctcatttctgt

SEQ ID NO: 19941 - RNA, 21 nt, synthetic construct
  source 1..21: mol_type = other RNA
ctaaatttctgtcctacaagt

SEQ ID NO: 19942 - RNA, 21 nt, synthetic construct
  source 1..21: mol_type = other RNA
ctaacaagatgtaagatggat

SEQ ID NO: 19943 - RNA, 21 nt, synthetic construct
  source 1..21: mol_type = other RNA
ctaacccgcgggccgcatggg

SEQ ID NO: 19944 - RNA, 21 nt, synthetic construct
  source 1..21: mol_type = other RNA
ctaacctcagatccaattctc

SEQ ID NO: 19945 - RNA, 21 nt, synthetic construct
  source 1..21: mol_type = other RNA
ctaactggtaagaacagaaat

SEQ ID NO: 19946 - RNA, 21 nt, synthetic construct
  source 1..21: mol_type = other RNA
ctaagatgcctggtagggatg

SEQ ID NO: 19947 - RNA, 21 nt, synthetic construct
  source 1..21: mol_type = other RNA
ctaagcatcatatcttgagtt

SEQ ID NO: 19948 - RNA, 21 nt, synthetic construct
  source 1..21: mol_type = other RNA
ctaagtccaacaaaccatttt

SEQ ID NO: 19949 - RNA, 21 nt, synthetic construct
  source 1..21: mol_type = other RNA
ctaatttgaattgcaactgtg

SEQ ID NO: 19950 - RNA, 21 nt, synthetic construct
  source 1..21: mol_type = other RNA
ctacaagttttcacttcctgg

SEQ ID NO: 19951 - RNA, 21 nt, synthetic construct
  source 1..21: mol_type = other RNA
ctacacacacaaatatgacct

SEQ ID NO: 19952 - RNA, 21 nt, synthetic construct
  source 1..21: mol_type = other RNA
ctacactttggtggtgcagca

SEQ ID NO: 19953 - RNA, 21 nt, synthetic construct
  source 1..21: mol_type = other RNA
ctacagctatactgtccacag

SEQ ID NO: 19954 - RNA, 21 nt, synthetic construct
  source 1..21: mol_type = other RNA
ctaccaggcatcttagcaact

SEQ ID NO: 19955 - RNA, 21 nt, synthetic construct
  source 1..21: mol_type = other RNA
ctacccaagatcaagagaggg

SEQ ID NO: 19956 - RNA, 21 nt, synthetic construct
  source 1..21: mol_type = other RNA
ctacccctttgcatccctacc

SEQ ID NO: 19957 - RNA, 21 nt, synthetic construct
  source 1..21: mol_type = other RNA
ctacccttgctgcttttaatc

SEQ ID NO: 19958 - RNA, 21 nt, synthetic construct
  source 1..21: mol_type = other RNA
ctactgctttacagagaattg

SEQ ID NO: 19959 - RNA, 21 nt, synthetic construct
  source 1..21: mol_type = other RNA
ctacttatcatttttggagca

SEQ ID NO: 19960 - RNA, 21 nt, synthetic construct
  source 1..21: mol_type = other RNA
ctagaaaaatgctccaaaaat

SEQ ID NO: 19961 - RNA, 21 nt, synthetic construct
  source 1..21: mol_type = other RNA
ctagacatcagagtatactag

SEQ ID NO: 19962 - RNA, 21 nt, synthetic construct
  source 1..21: mol_type = other RNA
ctagagacagacataaagcat

SEQ ID NO: 19963 - RNA, 21 nt, synthetic construct
  source 1..21: mol_type = other RNA
ctagaggagcaagtacaacaa

SEQ ID NO: 19964 - RNA, 21 nt, synthetic construct
  source 1..21: mol_type = other RNA
ctagccaactttaagtaaatg

SEQ ID NO: 19965 - RNA, 21 nt, synthetic construct
  source 1..21: mol_type = other RNA
ctagctttctccctctcttga

SEQ ID NO: 19966 - RNA, 21 nt, synthetic construct
  source 1..21: mol_type = other RNA
ctaggagctcaggagtacaag

SEQ ID NO: 19967 - RNA, 21 nt, synthetic construct
  source 1..21: mol_type = other RNA
ctagggaggaataaaagcact

SEQ ID NO: 19968 - RNA, 21 nt, synthetic construct
  source 1..21: mol_type = other RNA
ctagtatactctgatgtctag

SEQ ID NO: 19969 - RNA, 21 nt, synthetic construct
  source 1..21: mol_type = other RNA
ctagtattcagacatagcact

SEQ ID NO: 19970 - RNA, 21 nt, synthetic construct
  source 1..21: mol_type = other RNA
ctagtgctatgtctgaatact

SEQ ID NO: 19971 - RNA, 21 nt, synthetic construct
  source 1..21: mol_type = other RNA
ctagttcacgttcttaaatgt

SEQ ID NO: 19972 - RNA, 21 nt, synthetic construct
  source 1..21: mol_type = other RNA
ctataactcaagatatgatgc

SEQ ID NO: 19973 - RNA, 21 nt, synthetic construct
  source 1..21: mol_type = other RNA
ctatactgtccacagttgcaa

SEQ ID NO: 19974 - RNA, 21 nt, synthetic construct
  source 1..21: mol_type = other RNA
ctatcacacaggcatctgaga

SEQ ID NO: 19975 - RNA, 21 nt, synthetic construct
  source 1..21: mol_type = other RNA
ctatccagggaccttatgcat

SEQ ID NO: 19976 - RNA, 21 nt, synthetic construct
  source 1..21: mol_type = other RNA
ctatcttcctttaggacaatc

SEQ ID NO: 19977 - RNA, 21 nt, synthetic construct
  source 1..21: mol_type = other RNA
ctatgacccaaactgcccttt

SEQ ID NO: 19978 - RNA, 21 nt, synthetic construct
  source 1..21: mol_type = other RNA
ctatgacccacgcagtacaaa

SEQ ID NO: 19979 - RNA, 21 nt, synthetic construct
  source 1..21: mol_type = other RNA
ctatgatttgggtaactgcaa

SEQ ID NO: 19980 - RNA, 21 nt, synthetic construct
  source 1..21: mol_type = other RNA
ctatgtagctcctgtaacagt

SEQ ID NO: 19981 - RNA, 21 nt, synthetic construct
  source 1..21: mol_type = other RNA
ctatgtctgaatactagagga

SEQ ID NO: 19982 - RNA, 21 nt, synthetic construct
  source 1..21: mol_type = other RNA
ctattaagatttaacctgatg

SEQ ID NO: 19983 - RNA, 21 nt, synthetic construct
  source 1..21: mol_type = other RNA
ctattccttcaaaaagctcag

SEQ ID NO: 19984 - RNA, 21 nt, synthetic construct
  source 1..21: mol_type = other RNA
ctattctgagctttttgaagg

SEQ ID NO: 19985 - RNA, 21 nt, synthetic construct
  source 1..21: mol_type = other RNA
ctattttccacatactacaca

SEQ ID NO: 19986 - RNA, 21 nt, synthetic construct
  source 1..21: mol_type = other RNA
ctcaaatggtataaaactcag

SEQ ID NO: 19987 - RNA, 21 nt, synthetic construct
  source 1..21: mol_type = other RNA
ctcaagatatgatgcttagag

SEQ ID NO: 19988 - RNA, 21 nt, synthetic construct
  source 1..21: mol_type = other RNA
ctcaagccttaatttgtggtg

SEQ ID NO: 19989 - RNA, 21 nt, synthetic construct
  source 1..21: mol_type = other RNA
ctcaatttaacagctttttca

SEQ ID NO: 19990 - RNA, 21 nt, synthetic construct
  source 1..21: mol_type = other RNA
ctcaccctctctccccaggct

SEQ ID NO: 19991 - RNA, 21 nt, synthetic construct
  source 1..21: mol_type = other RNA
ctcacctccctaaaattcatt

SEQ ID NO: 19992 - RNA, 21 nt, synthetic construct
  source 1..21: mol_type = other RNA
ctcactcatacttgatcccat

SEQ ID NO: 19993 - RNA, 21 nt, synthetic construct
  source 1..21: mol_type = other RNA
ctcactccatttacttaaagt

SEQ ID NO: 19994 - RNA, 21 nt, synthetic construct
  source 1..21: mol_type = other RNA
ctcagaatagttaaggtaatt

SEQ ID NO: 19995 - RNA, 21 nt, synthetic construct
  source 1..21: mol_type = other RNA
ctcagatccaattctctgtaa

SEQ ID NO: 19996 - RNA, 21 nt, synthetic construct
  source 1..21: mol_type = other RNA
ctcagatgcctgtgtgatagc

SEQ ID NO: 19997 - RNA, 21 nt, synthetic construct
  source 1..21: mol_type = other RNA
ctcaggagtacaagacactat

SEQ ID NO: 19998 - RNA, 21 nt, synthetic construct
  source 1..21: mol_type = other RNA
ctcaggagtcagaagaaaact

SEQ ID NO: 19999 - RNA, 21 nt, synthetic construct
  source 1..21: mol_type = other RNA
ctcaggataaaacttactttg

SEQ ID NO: 20000 - RNA, 21 nt, synthetic construct
  source 1..21: mol_type = other RNA
ctcaggtgatcatgctttatg

SEQ ID NO: 20001 - RNA, 21 nt, synthetic construct
  source 1..21: mol_type = other RNA
ctcagtaaaaagagaaaacca

SEQ ID NO: 20002 - RNA, 21 nt, synthetic construct
  source 1..21: mol_type = other RNA
ctcatacttgatcccattttc

SEQ ID NO: 20003 - RNA, 21 nt, synthetic construct
  source 1..21: mol_type = other RNA
ctcatcagctgtcctttatat

SEQ ID NO: 20004 - RNA, 21 nt, synthetic construct
  source 1..21: mol_type = other RNA
ctcattaacgcttgctttcac

SEQ ID NO: 20005 - RNA, 21 nt, synthetic construct
  source 1..21: mol_type = other RNA
ctcatttctgttcttaccagt

SEQ ID NO: 20006 - RNA, 21 nt, synthetic construct
  source 1..21: mol_type = other RNA
ctccaaaaatgataagtagtg

SEQ ID NO: 20007 - RNA, 21 nt, synthetic construct
  source 1..21: mol_type = other RNA
ctccaatcaagtgtttccagg

SEQ ID NO: 20008 - RNA, 21 nt, synthetic construct
  source 1..21: mol_type = other RNA
ctccattactggcttgtactg

SEQ ID NO: 20009 - RNA, 21 nt, synthetic construct
  source 1..21: mol_type = other RNA
ctccatttacttaaagttggc

SEQ ID NO: 20010 - RNA, 21 nt, synthetic construct
  source 1..21: mol_type = other RNA
ctccccaggctctctacccct

SEQ ID NO: 20011 - RNA, 21 nt, synthetic construct
  source 1..21: mol_type = other RNA
ctcccctttggtcatgccttc

SEQ ID NO: 20012 - RNA, 21 nt, synthetic construct
  source 1..21: mol_type = other RNA
ctccctagttcacgttcttaa

SEQ ID NO: 20013 - RNA, 21 nt, synthetic construct
  source 1..21: mol_type = other RNA
ctccctcaccctctctcccca

SEQ ID NO: 20014 - RNA, 21 nt, synthetic construct
  source 1..21: mol_type = other RNA
ctccctctcttgatcttgggt

SEQ ID NO: 20015 - RNA, 21 nt, synthetic construct
  source 1..21: mol_type = other RNA
ctccctttttcttcctctaaa

SEQ ID NO: 20016 - RNA, 21 nt, synthetic construct
  source 1..21: mol_type = other RNA
ctcctaaaactttaagaaagt

SEQ ID NO: 20017 - RNA, 21 nt, synthetic construct
  source 1..21: mol_type = other RNA
ctcctagtatactctgatgtc

SEQ ID NO: 20018 - RNA, 21 nt, synthetic construct
  source 1..21: mol_type = other RNA
ctcctccaatcaagtgtttcc

SEQ ID NO: 20019 - RNA, 21 nt, synthetic construct
  source 1..21: mol_type = other RNA
ctcctctagtattcagacata

SEQ ID NO: 20020 - RNA, 21 nt, synthetic construct
  source 1..21: mol_type = other RNA
ctcctgaagtcacatggaatg

SEQ ID NO: 20021 - RNA, 21 nt, synthetic construct
  source 1..21: mol_type = other RNA
ctcctgagcagtttgtactgc

SEQ ID NO: 20022 - RNA, 21 nt, synthetic construct
  source 1..21: mol_type = other RNA
ctcctgagctcctagtatact

SEQ ID NO: 20023 - RNA, 21 nt, synthetic construct
  source 1..21: mol_type = other RNA
ctcctgtaacagtttaatgga

SEQ ID NO: 20024 - RNA, 21 nt, synthetic construct
  source 1..21: mol_type = other RNA
ctcgcgaaaccagacagattg

SEQ ID NO: 20025 - RNA, 21 nt, synthetic construct
  source 1..21: mol_type = other RNA
ctcgtgaatgtgatgcataag

SEQ ID NO: 20026 - RNA, 21 nt, synthetic construct
  source 1..21: mol_type = other RNA
ctctaaatacctctcatttct

SEQ ID NO: 20027 - RNA, 21 nt, synthetic construct
  source 1..21: mol_type = other RNA
ctctaagcatcatatcttgag

SEQ ID NO: 20028 - RNA, 21 nt, synthetic construct
  source 1..21: mol_type = other RNA
ctctacccctttgcatcccta

SEQ ID NO: 20029 - RNA, 21 nt, synthetic construct
  source 1..21: mol_type = other RNA
ctctagaaaaatgctccaaaa

SEQ ID NO: 20030 - RNA, 21 nt, synthetic construct
  source 1..21: mol_type = other RNA
ctctagtattcagacatagca

SEQ ID NO: 20031 - RNA, 21 nt, synthetic construct
  source 1..21: mol_type = other RNA
ctctatcttcctttaggacaa

SEQ ID NO: 20032 - RNA, 21 nt, synthetic construct
  source 1..21: mol_type = other RNA
ctctatgatttgggtaactgc

SEQ ID NO: 20033 - RNA, 21 nt, synthetic construct
  source 1..21: mol_type = other RNA
ctctcactcatacttgatccc

SEQ ID NO: 20034 - RNA, 21 nt, synthetic construct
  source 1..21: mol_type = other RNA
ctctcatttctgttcttacca

SEQ ID NO: 20035 - RNA, 21 nt, synthetic construct
  source 1..21: mol_type = other RNA
ctctccccaggctctctaccc

SEQ ID NO: 20036 - RNA, 21 nt, synthetic construct
  source 1..21: mol_type = other RNA
ctctcctgaagtcacatggaa

SEQ ID NO: 20037 - RNA, 21 nt, synthetic construct
  source 1..21: mol_type = other RNA
ctctctacccctttgcatccc

SEQ ID NO: 20038 - RNA, 21 nt, synthetic construct
  source 1..21: mol_type = other RNA
ctctctccccaggctctctac

SEQ ID NO: 20039 - RNA, 21 nt, synthetic construct
  source 1..21: mol_type = other RNA
ctctctcctgaagtcacatgg

SEQ ID NO: 20040 - RNA, 21 nt, synthetic construct
  source 1..21: mol_type = other RNA
ctctctggcccattacatttc

SEQ ID NO: 20041 - RNA, 21 nt, synthetic construct
  source 1..21: mol_type = other RNA
ctctcttgatcttgggtagcc

SEQ ID NO: 20042 - RNA, 21 nt, synthetic construct
  source 1..21: mol_type = other RNA
ctctgatgtctagccaacttt

SEQ ID NO: 20043 - RNA, 21 nt, synthetic construct
  source 1..21: mol_type = other RNA
ctctggcccattacatttcat

SEQ ID NO: 20044 - RNA, 21 nt, synthetic construct
  source 1..21: mol_type = other RNA
ctctgtaaagcagtagtcaag

SEQ ID NO: 20045 - RNA, 21 nt, synthetic construct
  source 1..21: mol_type = other RNA
ctctgtctttagtgttatctt

SEQ ID NO: 20046 - RNA, 21 nt, synthetic construct
  source 1..21: mol_type = other RNA
ctcttacccagcagtgctttt

SEQ ID NO: 20047 - RNA, 21 nt, synthetic construct
  source 1..21: mol_type = other RNA
ctcttgatcttgggtagcctg

SEQ ID NO: 20048 - RNA, 21 nt, synthetic construct
  source 1..21: mol_type = other RNA
ctctttttactgagcagtaag

SEQ ID NO: 20049 - RNA, 21 nt, synthetic construct
  source 1..21: mol_type = other RNA
ctgaaagctaagtccaacaaa

SEQ ID NO: 20050 - RNA, 21 nt, synthetic construct
  source 1..21: mol_type = other RNA
ctgaagctctctggcccatta

SEQ ID NO: 20051 - RNA, 21 nt, synthetic construct
  source 1..21: mol_type = other RNA
ctgaagtcacatggaatgaat

SEQ ID NO: 20052 - RNA, 21 nt, synthetic construct
  source 1..21: mol_type = other RNA
ctgaatactagaggagcaagt

SEQ ID NO: 20053 - RNA, 21 nt, synthetic construct
  source 1..21: mol_type = other RNA
ctgaccgtcttcacagtccag

SEQ ID NO: 20054 - RNA, 21 nt, synthetic construct
  source 1..21: mol_type = other RNA
ctgactcctgagcagtttgta

SEQ ID NO: 20055 - RNA, 21 nt, synthetic construct
  source 1..21: mol_type = other RNA
ctgagatcagttactaactgg

SEQ ID NO: 20056 - RNA, 21 nt, synthetic construct
  source 1..21: mol_type = other RNA
ctgagcagtaaggaaataaaa

SEQ ID NO: 20057 - RNA, 21 nt, synthetic construct
  source 1..21: mol_type = other RNA
ctgagcagtttgtactgcgtg

SEQ ID NO: 20058 - RNA, 21 nt, synthetic construct
  source 1..21: mol_type = other RNA
ctgagctcctagtatactctg

SEQ ID NO: 20059 - RNA, 21 nt, synthetic construct
  source 1..21: mol_type = other RNA
ctgagctttttgaaggaatag

SEQ ID NO: 20060 - RNA, 21 nt, synthetic construct
  source 1..21: mol_type = other RNA
ctgaggaattataataccaac

SEQ ID NO: 20061 - RNA, 21 nt, synthetic construct
  source 1..21: mol_type = other RNA
ctgaggttaggcaacatctcc

SEQ ID NO: 20062 - RNA, 21 nt, synthetic construct
  source 1..21: mol_type = other RNA
ctgagttttataccatttgag

SEQ ID NO: 20063 - RNA, 21 nt, synthetic construct
  source 1..21: mol_type = other RNA
ctgatatatttaactatgtag

SEQ ID NO: 20064 - RNA, 21 nt, synthetic construct
  source 1..21: mol_type = other RNA
ctgatctcagatgcctgtgtg

SEQ ID NO: 20065 - RNA, 21 nt, synthetic construct
  source 1..21: mol_type = other RNA
ctgatgctacactttggtggt

SEQ ID NO: 20066 - RNA, 21 nt, synthetic construct
  source 1..21: mol_type = other RNA
ctgatgtctagccaactttaa

SEQ ID NO: 20067 - RNA, 21 nt, synthetic construct
  source 1..21: mol_type = other RNA
ctgatttaaattaccttaact

SEQ ID NO: 20068 - RNA, 21 nt, synthetic construct
  source 1..21: mol_type = other RNA
ctgcaagaactgtcttgggcc

SEQ ID NO: 20069 - RNA, 21 nt, synthetic construct
  source 1..21: mol_type = other RNA
ctgcaattcattccatgtgac

SEQ ID NO: 20070 - RNA, 21 nt, synthetic construct
  source 1..21: mol_type = other RNA
ctgcaccaccaaagtgtagca

SEQ ID NO: 20071 - RNA, 21 nt, synthetic construct
  source 1..21: mol_type = other RNA
ctgcagattcaaatgtcatct

SEQ ID NO: 20072 - RNA, 21 nt, synthetic construct
  source 1..21: mol_type = other RNA
ctgcaggattaaaagcagcaa

SEQ ID NO: 20073 - RNA, 21 nt, synthetic construct
  source 1..21: mol_type = other RNA
ctgcccttttaaaaaagcagt

SEQ ID NO: 20074 - RNA, 21 nt, synthetic construct
  source 1..21: mol_type = other RNA
ctgccttggacaacagtgaaa

SEQ ID NO: 20075 - RNA, 21 nt, synthetic construct
  source 1..21: mol_type = other RNA
ctgcggattatcactacttat

SEQ ID NO: 20076 - RNA, 21 nt, synthetic construct
  source 1..21: mol_type = other RNA
ctgcgtgggtcatagtaattc

SEQ ID NO: 20077 - RNA, 21 nt, synthetic construct
  source 1..21: mol_type = other RNA
ctgctcaggagtcagaagaaa

SEQ ID NO: 20078 - RNA, 21 nt, synthetic construct
  source 1..21: mol_type = other RNA
ctgctcagtaaaaagagaaaa

SEQ ID NO: 20079 - RNA, 21 nt, synthetic construct
  source 1..21: mol_type = other RNA
ctgctgggtaagagtcaagcc

SEQ ID NO: 20080 - RNA, 21 nt, synthetic construct
  source 1..21: mol_type = other RNA
ctgctttacagagaattggat

SEQ ID NO: 20081 - RNA, 21 nt, synthetic construct
  source 1..21: mol_type = other RNA
ctgcttttaatcctgcagatt

SEQ ID NO: 20082 - RNA, 21 nt, synthetic construct
  source 1..21: mol_type = other RNA
ctgcttttttaaaagggcagt

SEQ ID NO: 20083 - RNA, 21 nt, synthetic construct
  source 1..21: mol_type = other RNA
ctggaaacacttgattggagg

SEQ ID NO: 20084 - RNA, 21 nt, synthetic construct
  source 1..21: mol_type = other RNA
ctggactgtgaagacggtcag

SEQ ID NO: 20085 - RNA, 21 nt, synthetic construct
  source 1..21: mol_type = other RNA
ctggatagactttcctcaatt

SEQ ID NO: 20086 - RNA, 21 nt, synthetic construct
  source 1..21: mol_type = other RNA
ctggcccattacatttcattt

SEQ ID NO: 20087 - RNA, 21 nt, synthetic construct
  source 1..21: mol_type = other RNA
ctggcttgtactgtttacagc

SEQ ID NO: 20088 - RNA, 21 nt, synthetic construct
  source 1..21: mol_type = other RNA
ctgggattctgtccctgaccg

SEQ ID NO: 20089 - RNA, 21 nt, synthetic construct
  source 1..21: mol_type = other RNA
ctgggccacactgcaagaact

SEQ ID NO: 20090 - RNA, 21 nt, synthetic construct
  source 1..21: mol_type = other RNA
ctggggagagagggtgaggga

SEQ ID NO: 20091 - RNA, 21 nt, synthetic construct
  source 1..21: mol_type = other RNA
ctggggcttgactcttaccca

SEQ ID NO: 20092 - RNA, 21 nt, synthetic construct
  source 1..21: mol_type = other RNA
ctggggttgttgtcattgctg

SEQ ID NO: 20093 - RNA, 21 nt, synthetic construct
  source 1..21: mol_type = other RNA
ctgggtaagagtcaagcccca

SEQ ID NO: 20094 - RNA, 21 nt, synthetic construct
  source 1..21: mol_type = other RNA
ctgggtcccatgcggcccgcg

SEQ ID NO: 20095 - RNA, 21 nt, synthetic construct
  source 1..21: mol_type = other RNA
ctgggttcatttgtatcacac

SEQ ID NO: 20096 - RNA, 21 nt, synthetic construct
  source 1..21: mol_type = other RNA
ctggtaagaacagaaatgaga

SEQ ID NO: 20097 - RNA, 21 nt, synthetic construct
  source 1..21: mol_type = other RNA
ctggtagggatgcaaaggggt

SEQ ID NO: 20098 - RNA, 21 nt, synthetic construct
  source 1..21: mol_type = other RNA
ctggtatgactaaagaactga

SEQ ID NO: 20099 - RNA, 21 nt, synthetic construct
  source 1..21: mol_type = other RNA
ctggtgtctcgcgaaaccaga

SEQ ID NO: 20100 - RNA, 21 nt, synthetic construct
  source 1..21: mol_type = other RNA
ctggtttacaggatgaattct

SEQ ID NO: 20101 - RNA, 21 nt, synthetic construct
  source 1..21: mol_type = other RNA
ctggtttcgcgagacaccagg

SEQ ID NO: 20102 - RNA, 21 nt, synthetic construct
  source 1..21: mol_type = other RNA
ctggtttctcaagcaaaagct

SEQ ID NO: 20103 - RNA, 21 nt, synthetic construct
  source 1..21: mol_type = other RNA
ctgtaaacagtacaagccagt

SEQ ID NO: 20104 - RNA, 21 nt, synthetic construct
  source 1..21: mol_type = other RNA
ctgtaaaccaggggtgtccaa

SEQ ID NO: 20105 - RNA, 21 nt, synthetic construct
  source 1..21: mol_type = other RNA
ctgtaaagcagtagtcaagat

SEQ ID NO: 20106 - RNA, 21 nt, synthetic construct
  source 1..21: mol_type = other RNA
ctgtaacagtttaatggaatc

SEQ ID NO: 20107 - RNA, 21 nt, synthetic construct
  source 1..21: mol_type = other RNA
ctgtaatccacagaacaagtc

SEQ ID NO: 20108 - RNA, 21 nt, synthetic construct
  source 1..21: mol_type = other RNA
ctgtagccccggacttgttct

SEQ ID NO: 20109 - RNA, 21 nt, synthetic construct
  source 1..21: mol_type = other RNA
ctgtattagcaatataaaaag

SEQ ID NO: 20110 - RNA, 21 nt, synthetic construct
  source 1..21: mol_type = other RNA
ctgtcattttcatgctctatc

SEQ ID NO: 20111 - RNA, 21 nt, synthetic construct
  source 1..21: mol_type = other RNA
ctgtccacagttgcaattcaa

SEQ ID NO: 20112 - RNA, 21 nt, synthetic construct
  source 1..21: mol_type = other RNA
ctgtccctgaccgtcttcaca

SEQ ID NO: 20113 - RNA, 21 nt, synthetic construct
  source 1..21: mol_type = other RNA
ctgtcctacaagttttcactt

SEQ ID NO: 20114 - RNA, 21 nt, synthetic construct
  source 1..21: mol_type = other RNA
ctgtcctgggtcccatgcggc

SEQ ID NO: 20115 - RNA, 21 nt, synthetic construct
  source 1..21: mol_type = other RNA
ctgtcctttatatgtggccca

SEQ ID NO: 20116 - RNA, 21 nt, synthetic construct
  source 1..21: mol_type = other RNA
ctgtctctagaaaaatgctcc

SEQ ID NO: 20117 - RNA, 21 nt, synthetic construct
  source 1..21: mol_type = other RNA
ctgtctctgtctttagtgtta

SEQ ID NO: 20118 - RNA, 21 nt, synthetic construct
  source 1..21: mol_type = other RNA
ctgtctggtttcgcgagacac

SEQ ID NO: 20119 - RNA, 21 nt, synthetic construct
  source 1..21: mol_type = other RNA
ctgtcttgggccacatataaa

SEQ ID NO: 20120 - RNA, 21 nt, synthetic construct
  source 1..21: mol_type = other RNA
ctgtctttagtgttatctttt

SEQ ID NO: 20121 - RNA, 21 nt, synthetic construct
  source 1..21: mol_type = other RNA
ctgtgaagacggtcagggaca

SEQ ID NO: 20122 - RNA, 21 nt, synthetic construct
  source 1..21: mol_type = other RNA
ctgtggacagtatagctgtag

SEQ ID NO: 20123 - RNA, 21 nt, synthetic construct
  source 1..21: mol_type = other RNA
ctgtggattacagaatacgtg

SEQ ID NO: 20124 - RNA, 21 nt, synthetic construct
  source 1..21: mol_type = other RNA
ctgtgtgatacaaatgaaccc

SEQ ID NO: 20125 - RNA, 21 nt, synthetic construct
  source 1..21: mol_type = other RNA
ctgtgtgatagcttccaaatt

SEQ ID NO: 20126 - RNA, 21 nt, synthetic construct
  source 1..21: mol_type = other RNA
ctgttaaattgaggaaagtct

SEQ ID NO: 20127 - RNA, 21 nt, synthetic construct
  source 1..21: mol_type = other RNA
ctgttacaggagctacatagt

SEQ ID NO: 20128 - RNA, 21 nt, synthetic construct
  source 1..21: mol_type = other RNA
ctgttctcgtgaatgtgatgc

SEQ ID NO: 20129 - RNA, 21 nt, synthetic construct
  source 1..21: mol_type = other RNA
ctgttcttaccagttagtaac

SEQ ID NO: 20130 - RNA, 21 nt, synthetic construct
  source 1..21: mol_type = other RNA
ctgttgtccaaggcaggcaca

SEQ ID NO: 20131 - RNA, 21 nt, synthetic construct
  source 1..21: mol_type = other RNA
ctgttgttctatgacccaaac

SEQ ID NO: 20132 - RNA, 21 nt, synthetic construct
  source 1..21: mol_type = other RNA
ctgtttacagcaagttgtcta

SEQ ID NO: 20133 - RNA, 21 nt, synthetic construct
  source 1..21: mol_type = other RNA
cttaaagttggctagacatca

SEQ ID NO: 20134 - RNA, 21 nt, synthetic construct
  source 1..21: mol_type = other RNA
cttaactattctgagcttttt

SEQ ID NO: 20135 - RNA, 21 nt, synthetic construct
  source 1..21: mol_type = other RNA
cttaatttgtggtggaaccaa

SEQ ID NO: 20136 - RNA, 21 nt, synthetic construct
  source 1..21: mol_type = other RNA
cttacatcttgttaggatgat

SEQ ID NO: 20137 - RNA, 21 nt, synthetic construct
  source 1..21: mol_type = other RNA
cttaccagttagtaactgatc

SEQ ID NO: 20138 - RNA, 21 nt, synthetic construct
  source 1..21: mol_type = other RNA
cttacccagcagtgcttttat

SEQ ID NO: 20139 - RNA, 21 nt, synthetic construct
  source 1..21: mol_type = other RNA
cttactgctcagtaaaaagag

SEQ ID NO: 20140 - RNA, 21 nt, synthetic construct
  source 1..21: mol_type = other RNA
cttactttgtgattgttttct

SEQ ID NO: 20141 - RNA, 21 nt, synthetic construct
  source 1..21: mol_type = other RNA
cttagagctcctccaatcaag

SEQ ID NO: 20142 - RNA, 21 nt, synthetic construct
  source 1..21: mol_type = other RNA
cttagcaactctcactcatac

SEQ ID NO: 20143 - RNA, 21 nt, synthetic construct
  source 1..21: mol_type = other RNA
cttagctgggattctgtccct

SEQ ID NO: 20144 - RNA, 21 nt, synthetic construct
  source 1..21: mol_type = other RNA
cttatcatttttggagcattt

SEQ ID NO: 20145 - RNA, 21 nt, synthetic construct
  source 1..21: mol_type = other RNA
cttatgcatcacattcacgag

SEQ ID NO: 20146 - RNA, 21 nt, synthetic construct
  source 1..21: mol_type = other RNA
cttcaaaaagctcagaatagt

SEQ ID NO: 20147 - RNA, 21 nt, synthetic construct
  source 1..21: mol_type = other RNA
cttcacagtccaggtgatctt

SEQ ID NO: 20148 - RNA, 21 nt, synthetic construct
  source 1..21: mol_type = other RNA
cttcagcttttatttccttac

SEQ ID NO: 20149 - RNA, 21 nt, synthetic construct
  source 1..21: mol_type = other RNA
cttcaggagagaggtcatatt

SEQ ID NO: 20150 - RNA, 21 nt, synthetic construct
  source 1..21: mol_type = other RNA
cttccaaattgctgtctctgt

SEQ ID NO: 20151 - RNA, 21 nt, synthetic construct
  source 1..21: mol_type = other RNA
cttccatggtctgttgttcta

SEQ ID NO: 20152 - RNA, 21 nt, synthetic construct
  source 1..21: mol_type = other RNA
cttccctccctcaccctctct

SEQ ID NO: 20153 - RNA, 21 nt, synthetic construct
  source 1..21: mol_type = other RNA
cttccctgggccacactgcaa

SEQ ID NO: 20154 - RNA, 21 nt, synthetic construct
  source 1..21: mol_type = other RNA
cttcctctaaatacctctcat

SEQ ID NO: 20155 - RNA, 21 nt, synthetic construct
  source 1..21: mol_type = other RNA
cttcctggaaacacttgattg

SEQ ID NO: 20156 - RNA, 21 nt, synthetic construct
  source 1..21: mol_type = other RNA
cttcctttaggacaatcatcc

SEQ ID NO: 20157 - RNA, 21 nt, synthetic construct
  source 1..21: mol_type = other RNA
cttctgactcctgagcagttt

SEQ ID NO: 20158 - RNA, 21 nt, synthetic construct
  source 1..21: mol_type = other RNA
cttgaatgaagaataggtctg

SEQ ID NO: 20159 - RNA, 21 nt, synthetic construct
  source 1..21: mol_type = other RNA
cttgactactgctttacagag

SEQ ID NO: 20160 - RNA, 21 nt, synthetic construct
  source 1..21: mol_type = other RNA
cttgactcttacccagcagtg

SEQ ID NO: 20161 - RNA, 21 nt, synthetic construct
  source 1..21: mol_type = other RNA
cttgagaaaccagtgcttccc

SEQ ID NO: 20162 - RNA, 21 nt, synthetic construct
  source 1..21: mol_type = other RNA
cttgagcattggaaaagtggc

SEQ ID NO: 20163 - RNA, 21 nt, synthetic construct
  source 1..21: mol_type = other RNA
cttgagctggggcttgactct

SEQ ID NO: 20164 - RNA, 21 nt, synthetic construct
  source 1..21: mol_type = other RNA
cttgagttatagaaaacaatc

SEQ ID NO: 20165 - RNA, 21 nt, synthetic construct
  source 1..21: mol_type = other RNA
cttgatcccattttccatttg

SEQ ID NO: 20166 - RNA, 21 nt, synthetic construct
  source 1..21: mol_type = other RNA
cttgatcttgggtagcctggt

SEQ ID NO: 20167 - RNA, 21 nt, synthetic construct
  source 1..21: mol_type = other RNA
cttgattggaggagctctaag

SEQ ID NO: 20168 - RNA, 21 nt, synthetic construct
  source 1..21: mol_type = other RNA
cttgcagtgtggcccagggaa

SEQ ID NO: 20169 - RNA, 21 nt, synthetic construct
  source 1..21: mol_type = other RNA
cttgctcctctagtattcaga

SEQ ID NO: 20170 - RNA, 21 nt, synthetic construct
  source 1..21: mol_type = other RNA
cttgctgcaccaccaaagtgt

SEQ ID NO: 20171 - RNA, 21 nt, synthetic construct
  source 1..21: mol_type = other RNA
cttgctgcttttaatcctgca

SEQ ID NO: 20172 - RNA, 21 nt, synthetic construct
  source 1..21: mol_type = other RNA
cttgctgtaaacagtacaagc

SEQ ID NO: 20173 - RNA, 21 nt, synthetic construct
  source 1..21: mol_type = other RNA
cttgctttcactgttgtccaa

SEQ ID NO: 20174 - RNA, 21 nt, synthetic construct
  source 1..21: mol_type = other RNA
cttggacaacagtgaaagcaa

SEQ ID NO: 20175 - RNA, 21 nt, synthetic construct
  source 1..21: mol_type = other RNA
cttgggccacatataaaggac

SEQ ID NO: 20176 - RNA, 21 nt, synthetic construct
  source 1..21: mol_type = other RNA
cttgggtagcctggtgtctcg

SEQ ID NO: 20177 - RNA, 21 nt, synthetic construct
  source 1..21: mol_type = other RNA
cttgtactcctgagctcctag

SEQ ID NO: 20178 - RNA, 21 nt, synthetic construct
  source 1..21: mol_type = other RNA
cttgtactgtttacagcaagt

SEQ ID NO: 20179 - RNA, 21 nt, synthetic construct
  source 1..21: mol_type = other RNA
cttgtaggacagaaatttagg

SEQ ID NO: 20180 - RNA, 21 nt, synthetic construct
  source 1..21: mol_type = other RNA
cttgttaggatgattgtccta

SEQ ID NO: 20181 - RNA, 21 nt, synthetic construct
  source 1..21: mol_type = other RNA
cttgttctgtggattacagaa

SEQ ID NO: 20182 - RNA, 21 nt, synthetic construct
  source 1..21: mol_type = other RNA
ctttaaaaatggtttgttgga

SEQ ID NO: 20183 - RNA, 21 nt, synthetic construct
  source 1..21: mol_type = other RNA
ctttaagtaaatggagtgagc

SEQ ID NO: 20184 - RNA, 21 nt, synthetic construct
  source 1..21: mol_type = other RNA
ctttacagagaattggatctg

SEQ ID NO: 20185 - RNA, 21 nt, synthetic construct
  source 1..21: mol_type = other RNA
ctttaggacaatcatcctaac

SEQ ID NO: 20186 - RNA, 21 nt, synthetic construct
  source 1..21: mol_type = other RNA
ctttagtcataccagccactt

SEQ ID NO: 20187 - RNA, 21 nt, synthetic construct
  source 1..21: mol_type = other RNA
ctttagtgttatcttttgatc

SEQ ID NO: 20188 - RNA, 21 nt, synthetic construct
  source 1..21: mol_type = other RNA
ctttatatgtggcccaagaca

SEQ ID NO: 20189 - RNA, 21 nt, synthetic construct
  source 1..21: mol_type = other RNA
ctttatgtctgtctctagaaa

SEQ ID NO: 20190 - RNA, 21 nt, synthetic construct
  source 1..21: mol_type = other RNA
ctttcactgttgtccaaggca

SEQ ID NO: 20191 - RNA, 21 nt, synthetic construct
  source 1..21: mol_type = other RNA
ctttcctcaatttaacagctt

SEQ ID NO: 20192 - RNA, 21 nt, synthetic construct
  source 1..21: mol_type = other RNA
ctttcggcttccctgggccac

SEQ ID NO: 20193 - RNA, 21 nt, synthetic construct
  source 1..21: mol_type = other RNA
ctttctccctctcttgatctt

SEQ ID NO: 20194 - RNA, 21 nt, synthetic construct
  source 1..21: mol_type = other RNA
ctttgcatccctaccaggcat

SEQ ID NO: 20195 - RNA, 21 nt, synthetic construct
  source 1..21: mol_type = other RNA
ctttggtcatgccttccatgg

SEQ ID NO: 20196 - RNA, 21 nt, synthetic construct
  source 1..21: mol_type = other RNA
ctttggtggtgcagcaagggt

SEQ ID NO: 20197 - RNA, 21 nt, synthetic construct
  source 1..21: mol_type = other RNA
ctttgtgattgttttctataa

SEQ ID NO: 20198 - RNA, 21 nt, synthetic construct
  source 1..21: mol_type = other RNA
ctttgtggggtggttcttttt

SEQ ID NO: 20199 - RNA, 21 nt, synthetic construct
  source 1..21: mol_type = other RNA
cttttaaaaaagcagttttct

SEQ ID NO: 20200 - RNA, 21 nt, synthetic construct
  source 1..21: mol_type = other RNA
cttttaatcctgcagattcaa

SEQ ID NO: 20201 - RNA, 21 nt, synthetic construct
  source 1..21: mol_type = other RNA
cttttattcctccctagttca

SEQ ID NO: 20202 - RNA, 21 nt, synthetic construct
  source 1..21: mol_type = other RNA
cttttatttccttactgctca

SEQ ID NO: 20203 - RNA, 21 nt, synthetic construct
  source 1..21: mol_type = other RNA
cttttccaatgctcaagatta

SEQ ID NO: 20204 - RNA, 21 nt, synthetic construct
  source 1..21: mol_type = other RNA
cttttgatccatcttacatct

SEQ ID NO: 20205 - RNA, 21 nt, synthetic construct
  source 1..21: mol_type = other RNA
cttttgcttgagaaaccagtg

SEQ ID NO: 20206 - RNA, 21 nt, synthetic construct
  source 1..21: mol_type = other RNA
ctttttactgagcagtaagga

SEQ ID NO: 20207 - RNA, 21 nt, synthetic construct
  source 1..21: mol_type = other RNA
ctttttccttagctgggattc

SEQ ID NO: 20208 - RNA, 21 nt, synthetic construct
  source 1..21: mol_type = other RNA
ctttttcttcctctaaatacc

SEQ ID NO: 20209 - RNA, 21 nt, synthetic construct
  source 1..21: mol_type = other RNA
ctttttgaaggaatagtgtct

SEQ ID NO: 20210 - RNA, 21 nt, synthetic construct
  source 1..21: mol_type = other RNA
ctttttggaatgctacccttg

SEQ ID NO: 20211 - RNA, 21 nt, synthetic construct
  source 1..21: mol_type = other RNA
cttttttaaaagggcagtttg

SEQ ID NO: 20212 - RNA, 21 nt, synthetic construct
  source 1..21: mol_type = other RNA
gaaaaagctgttaaattgagg

SEQ ID NO: 20213 - RNA, 21 nt, synthetic construct
  source 1..21: mol_type = other RNA
gaaaaagggagatgttgccta

SEQ ID NO: 20214 - RNA, 21 nt, synthetic construct
  source 1..21: mol_type = other RNA
gaaaaatgaaaaagctgttaa

SEQ ID NO: 20215 - RNA, 21 nt, synthetic construct
  source 1..21: mol_type = other RNA
gaaaaatgctccaaaaatgat

SEQ ID NO: 20216 - RNA, 21 nt, synthetic construct
  source 1..21: mol_type = other RNA
gaaaaattttagcttttgctt

SEQ ID NO: 20217 - RNA, 21 nt, synthetic construct
  source 1..21: mol_type = other RNA
gaaaacaatcacaaagtaagt

SEQ ID NO: 20218 - RNA, 21 nt, synthetic construct
  source 1..21: mol_type = other RNA
gaaaaccatcaatgtccacgt

SEQ ID NO: 20219 - RNA, 21 nt, synthetic construct
  source 1..21: mol_type = other RNA
gaaaactgcttttttaaaagg

SEQ ID NO: 20220 - RNA, 21 nt, synthetic construct
  source 1..21: mol_type = other RNA
gaaaacttgtaggacagaaat

SEQ ID NO: 20221 - RNA, 21 nt, synthetic construct
  source 1..21: mol_type = other RNA
gaaaagtggctggtatgacta

SEQ ID NO: 20222 - RNA, 21 nt, synthetic construct
  source 1..21: mol_type = other RNA
gaaaatcaagataaacattta

SEQ ID NO: 20223 - RNA, 21 nt, synthetic construct
  source 1..21: mol_type = other RNA
gaaaatgacaggtgaaactcc

SEQ ID NO: 20224 - RNA, 21 nt, synthetic construct
  source 1..21: mol_type = other RNA
gaaaatgggatcaagtatgag

SEQ ID NO: 20225 - RNA, 21 nt, synthetic construct
  source 1..21: mol_type = other RNA
gaaacacttgattggaggagc

SEQ ID NO: 20226 - RNA, 21 nt, synthetic construct
  source 1..21: mol_type = other RNA
gaaaccagacagattggttcc

SEQ ID NO: 20227 - RNA, 21 nt, synthetic construct
  source 1..21: mol_type = other RNA
gaaaccagtgcttccctccct

SEQ ID NO: 20228 - RNA, 21 nt, synthetic construct
  source 1..21: mol_type = other RNA
gaaactccattactggcttgt

SEQ ID NO: 20229 - RNA, 21 nt, synthetic construct
  source 1..21: mol_type = other RNA
gaaagattggacacccctggt

SEQ ID NO: 20230 - RNA, 21 nt, synthetic construct
  source 1..21: mol_type = other RNA
gaaagcaagcgttaatgagtt

SEQ ID NO: 20231 - RNA, 21 nt, synthetic construct
  source 1..21: mol_type = other RNA
gaaagctaagtccaacaaacc

SEQ ID NO: 20232 - RNA, 21 nt, synthetic construct
  source 1..21: mol_type = other RNA
gaaagctagtgctatgtctga

SEQ ID NO: 20233 - RNA, 21 nt, synthetic construct
  source 1..21: mol_type = other RNA
gaaagtctatccagggacctt

SEQ ID NO: 20234 - RNA, 21 nt, synthetic construct
  source 1..21: mol_type = other RNA
gaaataaaagctgaagctctc

SEQ ID NO: 20235 - RNA, 21 nt, synthetic construct
  source 1..21: mol_type = other RNA
gaaatccaaactcattaacgc

SEQ ID NO: 20236 - RNA, 21 nt, synthetic construct
  source 1..21: mol_type = other RNA
gaaatgagaggtatttagagg

SEQ ID NO: 20237 - RNA, 21 nt, synthetic construct
  source 1..21: mol_type = other RNA
gaaatgtaatgggccagagag

SEQ ID NO: 20238 - RNA, 21 nt, synthetic construct
  source 1..21: mol_type = other RNA
gaaatttaggctgggttcatt

SEQ ID NO: 20239 - RNA, 21 nt, synthetic construct
  source 1..21: mol_type = other RNA
gaacaacagaccatggaaggc

SEQ ID NO: 20240 - RNA, 21 nt, synthetic construct
  source 1..21: mol_type = other RNA
gaacaagtccggggctacagc

SEQ ID NO: 20241 - RNA, 21 nt, synthetic construct
  source 1..21: mol_type = other RNA
gaacagaaatgagaggtattt

SEQ ID NO: 20242 - RNA, 21 nt, synthetic construct
  source 1..21: mol_type = other RNA
gaacagaattcatcctgtaaa

SEQ ID NO: 20243 - RNA, 21 nt, synthetic construct
  source 1..21: mol_type = other RNA
gaaccaatctgtctggtttcg

SEQ ID NO: 20244 - RNA, 21 nt, synthetic construct
  source 1..21: mol_type = other RNA
gaaccaccccacaaagatata

SEQ ID NO: 20245 - RNA, 21 nt, synthetic construct
  source 1..21: mol_type = other RNA
gaacccagcctaaatttctgt

SEQ ID NO: 20246 - RNA, 21 nt, synthetic construct
  source 1..21: mol_type = other RNA
gaacgtgaactagggaggaat

SEQ ID NO: 20247 - RNA, 21 nt, synthetic construct
  source 1..21: mol_type = other RNA
gaactagggaggaataaaagc

SEQ ID NO: 20248 - RNA, 21 nt, synthetic construct
  source 1..21: mol_type = other RNA
gaactgtcttgggccacatat

SEQ ID NO: 20249 - RNA, 21 nt, synthetic construct
  source 1..21: mol_type = other RNA
gaacttgaatgaagaataggt

SEQ ID NO: 20250 - RNA, 21 nt, synthetic construct
  source 1..21: mol_type = other RNA
gaagaaaaagggagatgttgc

SEQ ID NO: 20251 - RNA, 21 nt, synthetic construct
  source 1..21: mol_type = other RNA
gaagaaaactgcttttttaaa

SEQ ID NO: 20252 - RNA, 21 nt, synthetic construct
  source 1..21: mol_type = other RNA
gaagaataggtctgtgtgata

SEQ ID NO: 20253 - RNA, 21 nt, synthetic construct
  source 1..21: mol_type = other RNA
gaagacggtcagggacagaat

SEQ ID NO: 20254 - RNA, 21 nt, synthetic construct
  source 1..21: mol_type = other RNA
gaagatagagcatgaaaatga

SEQ ID NO: 20255 - RNA, 21 nt, synthetic construct
  source 1..21: mol_type = other RNA
gaagcactggtttctcaagca

SEQ ID NO: 20256 - RNA, 21 nt, synthetic construct
  source 1..21: mol_type = other RNA
gaagccgaaagattggacacc

SEQ ID NO: 20257 - RNA, 21 nt, synthetic construct
  source 1..21: mol_type = other RNA
gaagctatcacacaggcatct

SEQ ID NO: 20258 - RNA, 21 nt, synthetic construct
  source 1..21: mol_type = other RNA
gaagctctctggcccattaca

SEQ ID NO: 20259 - RNA, 21 nt, synthetic construct
  source 1..21: mol_type = other RNA
gaaggaatagtgtcttgtact

SEQ ID NO: 20260 - RNA, 21 nt, synthetic construct
  source 1..21: mol_type = other RNA
gaaggcatgaccaaaggggag

SEQ ID NO: 20261 - RNA, 21 nt, synthetic construct
  source 1..21: mol_type = other RNA
gaagtcacatggaatgaattg

SEQ ID NO: 20262 - RNA, 21 nt, synthetic construct
  source 1..21: mol_type = other RNA
gaagtgaaaacttgtaggaca

SEQ ID NO: 20263 - RNA, 21 nt, synthetic construct
  source 1..21: mol_type = other RNA
gaataaaagcactgctgggta

SEQ ID NO: 20264 - RNA, 21 nt, synthetic construct
  source 1..21: mol_type = other RNA
gaatacgtggacattgatggt

SEQ ID NO: 20265 - RNA, 21 nt, synthetic construct
  source 1..21: mol_type = other RNA
gaatactagaggagcaagtac

SEQ ID NO: 20266 - RNA, 21 nt, synthetic construct
  source 1..21: mol_type = other RNA
gaataggtctgtgtgatacaa

SEQ ID NO: 20267 - RNA, 21 nt, synthetic construct
  source 1..21: mol_type = other RNA
gaatagtgtcttgtactcctg

SEQ ID NO: 20268 - RNA, 21 nt, synthetic construct
  source 1..21: mol_type = other RNA
gaatcccagctaaggaaaaag

SEQ ID NO: 20269 - RNA, 21 nt, synthetic construct
  source 1..21: mol_type = other RNA
gaatctcacctccctaaaatt

SEQ ID NO: 20270 - RNA, 21 nt, synthetic construct
  source 1..21: mol_type = other RNA
gaatctgcaggattaaaagca

SEQ ID NO: 20271 - RNA, 21 nt, synthetic construct
  source 1..21: mol_type = other RNA
gaatgaagaataggtctgtgt

SEQ ID NO: 20272 - RNA, 21 nt, synthetic construct
  source 1..21: mol_type = other RNA
gaatgaattgcagttacccaa

SEQ ID NO: 20273 - RNA, 21 nt, synthetic construct
  source 1..21: mol_type = other RNA
gaatgctacccttgctgcttt

SEQ ID NO: 20274 - RNA, 21 nt, synthetic construct
  source 1..21: mol_type = other RNA
gaatgtgatgcataaggtccc

SEQ ID NO: 20275 - RNA, 21 nt, synthetic construct
  source 1..21: mol_type = other RNA
gaattactatgacccacgcag

SEQ ID NO: 20276 - RNA, 21 nt, synthetic construct
  source 1..21: mol_type = other RNA
gaattcatcctgtaaaccagg

SEQ ID NO: 20277 - RNA, 21 nt, synthetic construct
  source 1..21: mol_type = other RNA
gaattctgttctcgtgaatgt

SEQ ID NO: 20278 - RNA, 21 nt, synthetic construct
  source 1..21: mol_type = other RNA
gaattgcaactgtggacagta

SEQ ID NO: 20279 - RNA, 21 nt, synthetic construct
  source 1..21: mol_type = other RNA
gaattgcagttacccaaatca

SEQ ID NO: 20280 - RNA, 21 nt, synthetic construct
  source 1..21: mol_type = other RNA
gaattggatctgaggttaggc

SEQ ID NO: 20281 - RNA, 21 nt, synthetic construct
  source 1..21: mol_type = other RNA
gaattttagggaggtgagatt

SEQ ID NO: 20282 - RNA, 21 nt, synthetic construct
  source 1..21: mol_type = other RNA
gacaacaaccccagaattact

SEQ ID NO: 20283 - RNA, 21 nt, synthetic construct
  source 1..21: mol_type = other RNA
gacaacagtgaaagcaagcgt

SEQ ID NO: 20284 - RNA, 21 nt, synthetic construct
  source 1..21: mol_type = other RNA
gacaacttgctgtaaacagta

SEQ ID NO: 20285 - RNA, 21 nt, synthetic construct
  source 1..21: mol_type = other RNA
gacaatcatcctaacaagatg

SEQ ID NO: 20286 - RNA, 21 nt, synthetic construct
  source 1..21: mol_type = other RNA
gacaccaggctacccaagatc

SEQ ID NO: 20287 - RNA, 21 nt, synthetic construct
  source 1..21: mol_type = other RNA
gacacccctggtttacaggat

SEQ ID NO: 20288 - RNA, 21 nt, synthetic construct
  source 1..21: mol_type = other RNA
gacactattccttcaaaaagc

SEQ ID NO: 20289 - RNA, 21 nt, synthetic construct
  source 1..21: mol_type = other RNA
gacagaaatttaggctgggtt

SEQ ID NO: 20290 - RNA, 21 nt, synthetic construct
  source 1..21: mol_type = other RNA
gacagaatcccagctaaggaa

SEQ ID NO: 20291 - RNA, 21 nt, synthetic construct
  source 1..21: mol_type = other RNA
gacagacataaagcatgatca

SEQ ID NO: 20292 - RNA, 21 nt, synthetic construct
  source 1..21: mol_type = other RNA
gacagagacagcaatttggaa

SEQ ID NO: 20293 - RNA, 21 nt, synthetic construct
  source 1..21: mol_type = other RNA
gacagattggttccaccacaa

SEQ ID NO: 20294 - RNA, 21 nt, synthetic construct
  source 1..21: mol_type = other RNA
gacagcaatttggaagctatc

SEQ ID NO: 20295 - RNA, 21 nt, synthetic construct
  source 1..21: mol_type = other RNA
gacaggtgaaactccattact

SEQ ID NO: 20296 - RNA, 21 nt, synthetic construct
  source 1..21: mol_type = other RNA
gacagtatagctgtagccccg

SEQ ID NO: 20297 - RNA, 21 nt, synthetic construct
  source 1..21: mol_type = other RNA
gacagttcttgcagtgtggcc

SEQ ID NO: 20298 - RNA, 21 nt, synthetic construct
  source 1..21: mol_type = other RNA
gacataaagcatgatcacctg

SEQ ID NO: 20299 - RNA, 21 nt, synthetic construct
  source 1..21: mol_type = other RNA
gacatagcactagctttctcc

SEQ ID NO: 20300 - RNA, 21 nt, synthetic construct
  source 1..21: mol_type = other RNA
gacatcagagtatactaggag

SEQ ID NO: 20301 - RNA, 21 nt, synthetic construct
  source 1..21: mol_type = other RNA
gacatgtaaatgtctttatgg

SEQ ID NO: 20302 - RNA, 21 nt, synthetic construct
  source 1..21: mol_type = other RNA
gacattgatggttttctcttt

SEQ ID NO: 20303 - RNA, 21 nt, synthetic construct
  source 1..21: mol_type = other RNA
gacatttacatgtcgctcact

SEQ ID NO: 20304 - RNA, 21 nt, synthetic construct
  source 1..21: mol_type = other RNA
gacatttgaatctgcaggatt

SEQ ID NO: 20305 - RNA, 21 nt, synthetic construct
  source 1..21: mol_type = other RNA
gacattttattaatcttgagc

SEQ ID NO: 20306 - RNA, 21 nt, synthetic construct
  source 1..21: mol_type = other RNA
gaccaaaggggagatgacatt

SEQ ID NO: 20307 - RNA, 21 nt, synthetic construct
  source 1..21: mol_type = other RNA
gaccatggaaggcatgaccaa

SEQ ID NO: 20308 - RNA, 21 nt, synthetic construct
  source 1..21: mol_type = other RNA
gacccaaactgcccttttaaa

SEQ ID NO: 20309 - RNA, 21 nt, synthetic construct
  source 1..21: mol_type = other RNA
gacccacgcagtacaaactgc

SEQ ID NO: 20310 - RNA, 21 nt, synthetic construct
  source 1..21: mol_type = other RNA
gacccaggacagctttgaatg

SEQ ID NO: 20311 - RNA, 21 nt, synthetic construct
  source 1..21: mol_type = other RNA
gacccttgctgcaccaccaaa

SEQ ID NO: 20312 - RNA, 21 nt, synthetic construct
  source 1..21: mol_type = other RNA
gaccgtcttcacagtccaggt

SEQ ID NO: 20313 - RNA, 21 nt, synthetic construct
  source 1..21: mol_type = other RNA
gacctattcttcattcaagtt

SEQ ID NO: 20314 - RNA, 21 nt, synthetic construct
  source 1..21: mol_type = other RNA
gacctctctcctgaagtcaca

SEQ ID NO: 20315 - RNA, 21 nt, synthetic construct
  source 1..21: mol_type = other RNA
gaccttatgcatcacattcac

SEQ ID NO: 20316 - RNA, 21 nt, synthetic construct
  source 1..21: mol_type = other RNA
gacggtcagggacagaatccc

SEQ ID NO: 20317 - RNA, 21 nt, synthetic construct
  source 1..21: mol_type = other RNA
gacgtcatatatctttgtggg

SEQ ID NO: 20318 - RNA, 21 nt, synthetic construct
  source 1..21: mol_type = other RNA
gacgtctctatgatttgggta

SEQ ID NO: 20319 - RNA, 21 nt, synthetic construct
  source 1..21: mol_type = other RNA
gactactgctttacagagaat

SEQ ID NO: 20320 - RNA, 21 nt, synthetic construct
  source 1..21: mol_type = other RNA
gactcctgagcagtttgtact

SEQ ID NO: 20321 - RNA, 21 nt, synthetic construct
  source 1..21: mol_type = other RNA
gactcttacccagcagtgctt

SEQ ID NO: 20322 - RNA, 21 nt, synthetic construct
  source 1..21: mol_type = other RNA
gactgcggattatcactactt

SEQ ID NO: 20323 - RNA, 21 nt, synthetic construct
  source 1..21: mol_type = other RNA
gactgtgaagacggtcaggga

SEQ ID NO: 20324 - RNA, 21 nt, synthetic construct
  source 1..21: mol_type = other RNA
gacttcaggagagaggtcata

SEQ ID NO: 20325 - RNA, 21 nt, synthetic construct
  source 1..21: mol_type = other RNA
gacttgttctgtggattacag

SEQ ID NO: 20326 - RNA, 21 nt, synthetic construct
  source 1..21: mol_type = other RNA
gactttcctcaatttaacagc

SEQ ID NO: 20327 - RNA, 21 nt, synthetic construct
  source 1..21: mol_type = other RNA
gagaaaaccatcaatgtccac

SEQ ID NO: 20328 - RNA, 21 nt, synthetic construct
  source 1..21: mol_type = other RNA
gagaaaccagtgcttccctcc

SEQ ID NO: 20329 - RNA, 21 nt, synthetic construct
  source 1..21: mol_type = other RNA
gagaaagctagtgctatgtct

SEQ ID NO: 20330 - RNA, 21 nt, synthetic construct
  source 1..21: mol_type = other RNA
gagaacagaattcatcctgta

SEQ ID NO: 20331 - RNA, 21 nt, synthetic construct
  source 1..21: mol_type = other RNA
gagaattggatctgaggttag

SEQ ID NO: 20332 - RNA, 21 nt, synthetic construct
  source 1..21: mol_type = other RNA
gagacaccaggctacccaaga

SEQ ID NO: 20333 - RNA, 21 nt, synthetic construct
  source 1..21: mol_type = other RNA
gagacagacataaagcatgat

SEQ ID NO: 20334 - RNA, 21 nt, synthetic construct
  source 1..21: mol_type = other RNA
gagacagcaatttggaagcta

SEQ ID NO: 20335 - RNA, 21 nt, synthetic construct
  source 1..21: mol_type = other RNA
gagacccttgctgcaccacca

SEQ ID NO: 20336 - RNA, 21 nt, synthetic construct
  source 1..21: mol_type = other RNA
gagacgtcatatatctttgtg

SEQ ID NO: 20337 - RNA, 21 nt, synthetic construct
  source 1..21: mol_type = other RNA
gagactgcggattatcactac

SEQ ID NO: 20338 - RNA, 21 nt, synthetic construct
  source 1..21: mol_type = other RNA
gagagagggtgagggagggaa

SEQ ID NO: 20339 - RNA, 21 nt, synthetic construct
  source 1..21: mol_type = other RNA
gagagaggtcatatttgtgtg

SEQ ID NO: 20340 - RNA, 21 nt, synthetic construct
  source 1..21: mol_type = other RNA
gagagcctggggagagagggt

SEQ ID NO: 20341 - RNA, 21 nt, synthetic construct
  source 1..21: mol_type = other RNA
gagagcttcagcttttatttc

SEQ ID NO: 20342 - RNA, 21 nt, synthetic construct
  source 1..21: mol_type = other RNA
gagagggagaaagctagtgct

SEQ ID NO: 20343 - RNA, 21 nt, synthetic construct
  source 1..21: mol_type = other RNA
gagagggtgagggagggaagc

SEQ ID NO: 20344 - RNA, 21 nt, synthetic construct
  source 1..21: mol_type = other RNA
gagaggtatttagaggaagaa

SEQ ID NO: 20345 - RNA, 21 nt, synthetic construct
  source 1..21: mol_type = other RNA
gagaggtcatatttgtgtgtg

SEQ ID NO: 20346 - RNA, 21 nt, synthetic construct
  source 1..21: mol_type = other RNA
gagagttgctaagatgcctgg

SEQ ID NO: 20347 - RNA, 21 nt, synthetic construct
  source 1..21: mol_type = other RNA
gagatcagttactaactggta

SEQ ID NO: 20348 - RNA, 21 nt, synthetic construct
  source 1..21: mol_type = other RNA
gagatgacatttgaatctgca

SEQ ID NO: 20349 - RNA, 21 nt, synthetic construct
  source 1..21: mol_type = other RNA
gagatgttgcctaacctcaga

SEQ ID NO: 20350 - RNA, 21 nt, synthetic construct
  source 1..21: mol_type = other RNA
gagattccattaaactgttac

SEQ ID NO: 20351 - RNA, 21 nt, synthetic construct
  source 1..21: mol_type = other RNA
gagcaagtacaacaaatggaa

SEQ ID NO: 20352 - RNA, 21 nt, synthetic construct
  source 1..21: mol_type = other RNA
gagcagtaaggaaataaaagc

SEQ ID NO: 20353 - RNA, 21 nt, synthetic construct
  source 1..21: mol_type = other RNA
gagcagtttgtactgcgtggg

SEQ ID NO: 20354 - RNA, 21 nt, synthetic construct
  source 1..21: mol_type = other RNA
gagcatgaaaatgacaggtga

SEQ ID NO: 20355 - RNA, 21 nt, synthetic construct
  source 1..21: mol_type = other RNA
gagcattggaaaagtggctgg

SEQ ID NO: 20356 - RNA, 21 nt, synthetic construct
  source 1..21: mol_type = other RNA
gagcatttttctagagacaga

SEQ ID NO: 20357 - RNA, 21 nt, synthetic construct
  source 1..21: mol_type = other RNA
gagcctggggagagagggtga

SEQ ID NO: 20358 - RNA, 21 nt, synthetic construct
  source 1..21: mol_type = other RNA
gagcgacatgtaaatgtcttt

SEQ ID NO: 20359 - RNA, 21 nt, synthetic construct
  source 1..21: mol_type = other RNA
gagctacatagttaaatatat

SEQ ID NO: 20360 - RNA, 21 nt, synthetic construct
  source 1..21: mol_type = other RNA
gagctcaggagtacaagacac

SEQ ID NO: 20361 - RNA, 21 nt, synthetic construct
  source 1..21: mol_type = other RNA
gagctcctagtatactctgat

SEQ ID NO: 20362 - RNA, 21 nt, synthetic construct
  source 1..21: mol_type = other RNA
gagctcctccaatcaagtgtt

SEQ ID NO: 20363 - RNA, 21 nt, synthetic construct
  source 1..21: mol_type = other RNA
gagctctaagcatcatatctt

SEQ ID NO: 20364 - RNA, 21 nt, synthetic construct
  source 1..21: mol_type = other RNA
gagctggggcttgactcttac

SEQ ID NO: 20365 - RNA, 21 nt, synthetic construct
  source 1..21: mol_type = other RNA
gagcttcagcttttatttcct

SEQ ID NO: 20366 - RNA, 21 nt, synthetic construct
  source 1..21: mol_type = other RNA
gagctttttgaaggaatagtg

SEQ ID NO: 20367 - RNA, 21 nt, synthetic construct
  source 1..21: mol_type = other RNA
gaggaaagtctatccagggac

SEQ ID NO: 20368 - RNA, 21 nt, synthetic construct
  source 1..21: mol_type = other RNA
gaggaagaaaaagggagatgt

SEQ ID NO: 20369 - RNA, 21 nt, synthetic construct
  source 1..21: mol_type = other RNA
gaggaataaaagcactgctgg

SEQ ID NO: 20370 - RNA, 21 nt, synthetic construct
  source 1..21: mol_type = other RNA
gaggaattataataccaacat

SEQ ID NO: 20371 - RNA, 21 nt, synthetic construct
  source 1..21: mol_type = other RNA
gaggagcaagtacaacaaatg

SEQ ID NO: 20372 - RNA, 21 nt, synthetic construct
  source 1..21: mol_type = other RNA
gaggagctctaagcatcatat

SEQ ID NO: 20373 - RNA, 21 nt, synthetic construct
  source 1..21: mol_type = other RNA
gagggaagcactggtttctca

SEQ ID NO: 20374 - RNA, 21 nt, synthetic construct
  source 1..21: mol_type = other RNA
gagggagaaagctagtgctat

SEQ ID NO: 20375 - RNA, 21 nt, synthetic construct
  source 1..21: mol_type = other RNA
gagggagggaagcactggttt

SEQ ID NO: 20376 - RNA, 21 nt, synthetic construct
  source 1..21: mol_type = other RNA
gagggtgagggagggaagcac

SEQ ID NO: 20377 - RNA, 21 nt, synthetic construct
  source 1..21: mol_type = other RNA
gaggtatttagaggaagaaaa

SEQ ID NO: 20378 - RNA, 21 nt, synthetic construct
  source 1..21: mol_type = other RNA
gaggtcatatttgtgtgtgta

SEQ ID NO: 20379 - RNA, 21 nt, synthetic construct
  source 1..21: mol_type = other RNA
gaggtgagattccattaaact

SEQ ID NO: 20380 - RNA, 21 nt, synthetic construct
  source 1..21: mol_type = other RNA
gaggttaggcaacatctccct

SEQ ID NO: 20381 - RNA, 21 nt, synthetic construct
  source 1..21: mol_type = other RNA
gagtacaagacactattcctt

SEQ ID NO: 20382 - RNA, 21 nt, synthetic construct
  source 1..21: mol_type = other RNA
gagtatactaggagctcagga

SEQ ID NO: 20383 - RNA, 21 nt, synthetic construct
  source 1..21: mol_type = other RNA
gagtcaagccccagctcaagc

SEQ ID NO: 20384 - RNA, 21 nt, synthetic construct
  source 1..21: mol_type = other RNA
gagtcagaagaaaactgcttt

SEQ ID NO: 20385 - RNA, 21 nt, synthetic construct
  source 1..21: mol_type = other RNA
gagtgagagttgctaagatgc

SEQ ID NO: 20386 - RNA, 21 nt, synthetic construct
  source 1..21: mol_type = other RNA
gagtgagcgacatgtaaatgt

SEQ ID NO: 20387 - RNA, 21 nt, synthetic construct
  source 1..21: mol_type = other RNA
gagttatagaaaacaatcaca

SEQ ID NO: 20388 - RNA, 21 nt, synthetic construct
  source 1..21: mol_type = other RNA
gagttgctaagatgcctggta

SEQ ID NO: 20389 - RNA, 21 nt, synthetic construct
  source 1..21: mol_type = other RNA
gagtttcacctgtcattttca

SEQ ID NO: 20390 - RNA, 21 nt, synthetic construct
  source 1..21: mol_type = other RNA
gagttttataccatttgagac

SEQ ID NO: 20391 - RNA, 21 nt, synthetic construct
  source 1..21: mol_type = other RNA
gataaacatttaagaacgtga

SEQ ID NO: 20392 - RNA, 21 nt, synthetic construct
  source 1..21: mol_type = other RNA
gataacactaaagacagagac

SEQ ID NO: 20393 - RNA, 21 nt, synthetic construct
  source 1..21: mol_type = other RNA
gataagtagtgataatccgca

SEQ ID NO: 20394 - RNA, 21 nt, synthetic construct
  source 1..21: mol_type = other RNA
gatacaaatgaacccagccta

SEQ ID NO: 20395 - RNA, 21 nt, synthetic construct
  source 1..21: mol_type = other RNA
gatagactttcctcaatttaa

SEQ ID NO: 20396 - RNA, 21 nt, synthetic construct
  source 1..21: mol_type = other RNA
gatagagcatgaaaatgacag

SEQ ID NO: 20397 - RNA, 21 nt, synthetic construct
  source 1..21: mol_type = other RNA
gatagcttccaaattgctgtc

SEQ ID NO: 20398 - RNA, 21 nt, synthetic construct
  source 1..21: mol_type = other RNA
gatatatgacgtctctatgat

SEQ ID NO: 20399 - RNA, 21 nt, synthetic construct
  source 1..21: mol_type = other RNA
gatatatttaactatgtagct

SEQ ID NO: 20400 - RNA, 21 nt, synthetic construct
  source 1..21: mol_type = other RNA
gatatgatgcttagagctcct

SEQ ID NO: 20401 - RNA, 21 nt, synthetic construct
  source 1..21: mol_type = other RNA
gatcaaaagataacactaaag

SEQ ID NO: 20402 - RNA, 21 nt, synthetic construct
  source 1..21: mol_type = other RNA
gatcaagagagggagaaagct

SEQ ID NO: 20403 - RNA, 21 nt, synthetic construct
  source 1..21: mol_type = other RNA
gatcaagtatgagtgagagtt

SEQ ID NO: 20404 - RNA, 21 nt, synthetic construct
  source 1..21: mol_type = other RNA
gatcacctgagttttatacca

SEQ ID NO: 20405 - RNA, 21 nt, synthetic construct
  source 1..21: mol_type = other RNA
gatcacctggactgtgaagac

SEQ ID NO: 20406 - RNA, 21 nt, synthetic construct
  source 1..21: mol_type = other RNA
gatcagttactaactggtaag

SEQ ID NO: 20407 - RNA, 21 nt, synthetic construct
  source 1..21: mol_type = other RNA
gatcatgctttatgtctgtct

SEQ ID NO: 20408 - RNA, 21 nt, synthetic construct
  source 1..21: mol_type = other RNA
gatccaattctctgtaaagca

SEQ ID NO: 20409 - RNA, 21 nt, synthetic construct
  source 1..21: mol_type = other RNA
gatccatcttacatcttgtta

SEQ ID NO: 20410 - RNA, 21 nt, synthetic construct
  source 1..21: mol_type = other RNA
gatcccattttccatttgttg

SEQ ID NO: 20411 - RNA, 21 nt, synthetic construct
  source 1..21: mol_type = other RNA
gatctcagatgcctgtgtgat

SEQ ID NO: 20412 - RNA, 21 nt, synthetic construct
  source 1..21: mol_type = other RNA
gatctgaggttaggcaacatc

SEQ ID NO: 20413 - RNA, 21 nt, synthetic construct
  source 1..21: mol_type = other RNA
gatcttgactactgctttaca

SEQ ID NO: 20414 - RNA, 21 nt, synthetic construct
  source 1..21: mol_type = other RNA
gatcttgggtagcctggtgtc

SEQ ID NO: 20415 - RNA, 21 nt, synthetic construct
  source 1..21: mol_type = other RNA
gatgaattctgttctcgtgaa

SEQ ID NO: 20416 - RNA, 21 nt, synthetic construct
  source 1..21: mol_type = other RNA
gatgacatttgaatctgcagg

SEQ ID NO: 20417 - RNA, 21 nt, synthetic construct
  source 1..21: mol_type = other RNA
gatgattgtcctaaaggaaga

SEQ ID NO: 20418 - RNA, 21 nt, synthetic construct
  source 1..21: mol_type = other RNA
gatgcaaaggggtagagagcc

SEQ ID NO: 20419 - RNA, 21 nt, synthetic construct
  source 1..21: mol_type = other RNA
gatgcataaggtccctggata

SEQ ID NO: 20420 - RNA, 21 nt, synthetic construct
  source 1..21: mol_type = other RNA
gatgcctggtagggatgcaaa

SEQ ID NO: 20421 - RNA, 21 nt, synthetic construct
  source 1..21: mol_type = other RNA
gatgcctgtgtgatagcttcc

SEQ ID NO: 20422 - RNA, 21 nt, synthetic construct
  source 1..21: mol_type = other RNA
gatgctacactttggtggtgc

SEQ ID NO: 20423 - RNA, 21 nt, synthetic construct
  source 1..21: mol_type = other RNA
gatgcttagagctcctccaat

SEQ ID NO: 20424 - RNA, 21 nt, synthetic construct
  source 1..21: mol_type = other RNA
gatggatcaaaagataacact

SEQ ID NO: 20425 - RNA, 21 nt, synthetic construct
  source 1..21: mol_type = other RNA
gatggttttctctttttactg

SEQ ID NO: 20426 - RNA, 21 nt, synthetic construct
  source 1..21: mol_type = other RNA
gatgtaagatggatcaaaaga

SEQ ID NO: 20427 - RNA, 21 nt, synthetic construct
  source 1..21: mol_type = other RNA
gatgtctagccaactttaagt

SEQ ID NO: 20428 - RNA, 21 nt, synthetic construct
  source 1..21: mol_type = other RNA
gatgtgcctgccttggacaac

SEQ ID NO: 20429 - RNA, 21 nt, synthetic construct
  source 1..21: mol_type = other RNA
gatgttgcctaacctcagatc

SEQ ID NO: 20430 - RNA, 21 nt, synthetic construct
  source 1..21: mol_type = other RNA
gattaaaagcagcaagggtag

SEQ ID NO: 20431 - RNA, 21 nt, synthetic construct
  source 1..21: mol_type = other RNA
gattacagaatacgtggacat

SEQ ID NO: 20432 - RNA, 21 nt, synthetic construct
  source 1..21: mol_type = other RNA
gattatcactacttatcattt

SEQ ID NO: 20433 - RNA, 21 nt, synthetic construct
  source 1..21: mol_type = other RNA
gattcaaatgtcatctcccct

SEQ ID NO: 20434 - RNA, 21 nt, synthetic construct
  source 1..21: mol_type = other RNA
gattccattaaactgttacag

SEQ ID NO: 20435 - RNA, 21 nt, synthetic construct
  source 1..21: mol_type = other RNA
gattctgtccctgaccgtctt

SEQ ID NO: 20436 - RNA, 21 nt, synthetic construct
  source 1..21: mol_type = other RNA
gattggacacccctggtttac

SEQ ID NO: 20437 - RNA, 21 nt, synthetic construct
  source 1..21: mol_type = other RNA
gattggaggagctctaagcat

SEQ ID NO: 20438 - RNA, 21 nt, synthetic construct
  source 1..21: mol_type = other RNA
gattggttccaccacaaatta

SEQ ID NO: 20439 - RNA, 21 nt, synthetic construct
  source 1..21: mol_type = other RNA
gattgtcctaaaggaagatag

SEQ ID NO: 20440 - RNA, 21 nt, synthetic construct
  source 1..21: mol_type = other RNA
gattgttttctataactcaag

SEQ ID NO: 20441 - RNA, 21 nt, synthetic construct
  source 1..21: mol_type = other RNA
gatttaaattaccttaactat

SEQ ID NO: 20442 - RNA, 21 nt, synthetic construct
  source 1..21: mol_type = other RNA
gatttaacctgatgctacact

SEQ ID NO: 20443 - RNA, 21 nt, synthetic construct
  source 1..21: mol_type = other RNA
gatttgggtaactgcaattca

SEQ ID NO: 20444 - RNA, 21 nt, synthetic construct
  source 1..21: mol_type = other RNA
gattttcattttatccttttt

SEQ ID NO: 20445 - RNA, 21 nt, synthetic construct
  source 1..21: mol_type = other RNA
gcaaaggggtagagagcctgg

SEQ ID NO: 20446 - RNA, 21 nt, synthetic construct
  source 1..21: mol_type = other RNA
gcaacatctccctttttcttc

SEQ ID NO: 20447 - RNA, 21 nt, synthetic construct
  source 1..21: mol_type = other RNA
gcaacgagactgcggattatc

SEQ ID NO: 20448 - RNA, 21 nt, synthetic construct
  source 1..21: mol_type = other RNA
gcaactctcactcatacttga

SEQ ID NO: 20449 - RNA, 21 nt, synthetic construct
  source 1..21: mol_type = other RNA
gcaactgtggacagtatagct

SEQ ID NO: 20450 - RNA, 21 nt, synthetic construct
  source 1..21: mol_type = other RNA
gcaagaactgtcttgggccac

SEQ ID NO: 20451 - RNA, 21 nt, synthetic construct
  source 1..21: mol_type = other RNA
gcaagcgttaatgagtttgga

SEQ ID NO: 20452 - RNA, 21 nt, synthetic construct
  source 1..21: mol_type = other RNA
gcaagggtagcattccaaaaa

SEQ ID NO: 20453 - RNA, 21 nt, synthetic construct
  source 1..21: mol_type = other RNA
gcaagggtctcaaatggtata

SEQ ID NO: 20454 - RNA, 21 nt, synthetic construct
  source 1..21: mol_type = other RNA
gcaagtacaacaaatggaaaa

SEQ ID NO: 20455 - RNA, 21 nt, synthetic construct
  source 1..21: mol_type = other RNA
gcaagttgtctaacccgcggg

SEQ ID NO: 20456 - RNA, 21 nt, synthetic construct
  source 1..21: mol_type = other RNA
gcaatgacaacaaccccagaa

SEQ ID NO: 20457 - RNA, 21 nt, synthetic construct
  source 1..21: mol_type = other RNA
gcaattcattccatgtgactt

SEQ ID NO: 20458 - RNA, 21 nt, synthetic construct
  source 1..21: mol_type = other RNA
gcaatttggaagctatcacac

SEQ ID NO: 20459 - RNA, 21 nt, synthetic construct
  source 1..21: mol_type = other RNA
gcacatctttaaaaatggttt

SEQ ID NO: 20460 - RNA, 21 nt, synthetic construct
  source 1..21: mol_type = other RNA
gcaccaccaaagtgtagcatc

SEQ ID NO: 20461 - RNA, 21 nt, synthetic construct
  source 1..21: mol_type = other RNA
gcactagctttctccctctct

SEQ ID NO: 20462 - RNA, 21 nt, synthetic construct
  source 1..21: mol_type = other RNA
gcactgctgggtaagagtcaa

SEQ ID NO: 20463 - RNA, 21 nt, synthetic construct
  source 1..21: mol_type = other RNA
gcactggtttctcaagcaaaa

SEQ ID NO: 20464 - RNA, 21 nt, synthetic construct
  source 1..21: mol_type = other RNA
gcagattcaaatgtcatctcc

SEQ ID NO: 20465 - RNA, 21 nt, synthetic construct
  source 1..21: mol_type = other RNA
gcagcaagggtagcattccaa

SEQ ID NO: 20466 - RNA, 21 nt, synthetic construct
  source 1..21: mol_type = other RNA
gcagcaagggtctcaaatggt

SEQ ID NO: 20467 - RNA, 21 nt, synthetic construct
  source 1..21: mol_type = other RNA
gcaggattaaaagcagcaagg

SEQ ID NO: 20468 - RNA, 21 nt, synthetic construct
  source 1..21: mol_type = other RNA
gcaggcacatctttaaaaatg

SEQ ID NO: 20469 - RNA, 21 nt, synthetic construct
  source 1..21: mol_type = other RNA
gcagtaaggaaataaaagctg

SEQ ID NO: 20470 - RNA, 21 nt, synthetic construct
  source 1..21: mol_type = other RNA
gcagtacaaactgctcaggag

SEQ ID NO: 20471 - RNA, 21 nt, synthetic construct
  source 1..21: mol_type = other RNA
gcagtagtcaagatcacctgg

SEQ ID NO: 20472 - RNA, 21 nt, synthetic construct
  source 1..21: mol_type = other RNA
gcagtgcttttattcctccct

SEQ ID NO: 20473 - RNA, 21 nt, synthetic construct
  source 1..21: mol_type = other RNA
gcagtgtggcccagggaagcc

SEQ ID NO: 20474 - RNA, 21 nt, synthetic construct
  source 1..21: mol_type = other RNA
gcagttaaatgaaatgtaatg

SEQ ID NO: 20475 - RNA, 21 nt, synthetic construct
  source 1..21: mol_type = other RNA
gcagttacccaaatcatagag

SEQ ID NO: 20476 - RNA, 21 nt, synthetic construct
  source 1..21: mol_type = other RNA
gcagtttgggtcatagaacaa

SEQ ID NO: 20477 - RNA, 21 nt, synthetic construct
  source 1..21: mol_type = other RNA
gcagtttgtactgcgtgggtc

SEQ ID NO: 20478 - RNA, 21 nt, synthetic construct
  source 1..21: mol_type = other RNA
gcagttttcttctgactcctg

SEQ ID NO: 20479 - RNA, 21 nt, synthetic construct
  source 1..21: mol_type = other RNA
gcataaggtccctggatagac

SEQ ID NO: 20480 - RNA, 21 nt, synthetic construct
  source 1..21: mol_type = other RNA
gcataatgaattttagggagg

SEQ ID NO: 20481 - RNA, 21 nt, synthetic construct
  source 1..21: mol_type = other RNA
gcatcacattcacgagaacag

SEQ ID NO: 20482 - RNA, 21 nt, synthetic construct
  source 1..21: mol_type = other RNA
gcatcatatcttgagttatag

SEQ ID NO: 20483 - RNA, 21 nt, synthetic construct
  source 1..21: mol_type = other RNA
gcatccctaccaggcatctta

SEQ ID NO: 20484 - RNA, 21 nt, synthetic construct
  source 1..21: mol_type = other RNA
gcatctgagatcagttactaa

SEQ ID NO: 20485 - RNA, 21 nt, synthetic construct
  source 1..21: mol_type = other RNA
gcatcttagcaactctcactc

SEQ ID NO: 20486 - RNA, 21 nt, synthetic construct
  source 1..21: mol_type = other RNA
gcatgaaaatgacaggtgaaa

SEQ ID NO: 20487 - RNA, 21 nt, synthetic construct
  source 1..21: mol_type = other RNA
gcatgaccaaaggggagatga

SEQ ID NO: 20488 - RNA, 21 nt, synthetic construct
  source 1..21: mol_type = other RNA
gcatgatcacctgagttttat

SEQ ID NO: 20489 - RNA, 21 nt, synthetic construct
  source 1..21: mol_type = other RNA
gcatgggacccaggacagctt

SEQ ID NO: 20490 - RNA, 21 nt, synthetic construct
  source 1..21: mol_type = other RNA
gcattcaaagctgtcctgggt

SEQ ID NO: 20491 - RNA, 21 nt, synthetic construct
  source 1..21: mol_type = other RNA
gcattccaaaaagaaccaccc

SEQ ID NO: 20492 - RNA, 21 nt, synthetic construct
  source 1..21: mol_type = other RNA
gcattggaaaagtggctggta

SEQ ID NO: 20493 - RNA, 21 nt, synthetic construct
  source 1..21: mol_type = other RNA
gcatttggtgttaaaatgttg

SEQ ID NO: 20494 - RNA, 21 nt, synthetic construct
  source 1..21: mol_type = other RNA
gcatttttctagagacagaca

SEQ ID NO: 20495 - RNA, 21 nt, synthetic construct
  source 1..21: mol_type = other RNA
gccaactttaagtaaatggag

SEQ ID NO: 20496 - RNA, 21 nt, synthetic construct
  source 1..21: mol_type = other RNA
gccacactgcaagaactgtct

SEQ ID NO: 20497 - RNA, 21 nt, synthetic construct
  source 1..21: mol_type = other RNA
gccacatataaaggacagctg

SEQ ID NO: 20498 - RNA, 21 nt, synthetic construct
  source 1..21: mol_type = other RNA
gccacttttccaatgctcaag

SEQ ID NO: 20499 - RNA, 21 nt, synthetic construct
  source 1..21: mol_type = other RNA
gccagagagcttcagctttta

SEQ ID NO: 20500 - RNA, 21 nt, synthetic construct
  source 1..21: mol_type = other RNA
gccagtaatggagtttcacct

SEQ ID NO: 20501 - RNA, 21 nt, synthetic construct
  source 1..21: mol_type = other RNA
gcccaagacagttcttgcagt

SEQ ID NO: 20502 - RNA, 21 nt, synthetic construct
  source 1..21: mol_type = other RNA
gcccattacatttcatttaac

SEQ ID NO: 20503 - RNA, 21 nt, synthetic construct
  source 1..21: mol_type = other RNA
gccccagctcaagccttaatt

SEQ ID NO: 20504 - RNA, 21 nt, synthetic construct
  source 1..21: mol_type = other RNA
gccccggacttgttctgtgga

SEQ ID NO: 20505 - RNA, 21 nt, synthetic construct
  source 1..21: mol_type = other RNA
gcccgcgggttagacaacttg

SEQ ID NO: 20506 - RNA, 21 nt, synthetic construct
  source 1..21: mol_type = other RNA
gcccttttaaaaaagcagttt

SEQ ID NO: 20507 - RNA, 21 nt, synthetic construct
  source 1..21: mol_type = other RNA
gccgaaagattggacacccct

SEQ ID NO: 20508 - RNA, 21 nt, synthetic construct
  source 1..21: mol_type = other RNA
gccgcatgggacccaggacag

SEQ ID NO: 20509 - RNA, 21 nt, synthetic construct
  source 1..21: mol_type = other RNA
gcctaaatttctgtcctacaa

SEQ ID NO: 20510 - RNA, 21 nt, synthetic construct
  source 1..21: mol_type = other RNA
gcctaacctcagatccaattc

SEQ ID NO: 20511 - RNA, 21 nt, synthetic construct
  source 1..21: mol_type = other RNA
gcctgccttggacaacagtga

SEQ ID NO: 20512 - RNA, 21 nt, synthetic construct
  source 1..21: mol_type = other RNA
gcctggggagagagggtgagg

SEQ ID NO: 20513 - RNA, 21 nt, synthetic construct
  source 1..21: mol_type = other RNA
gcctggtagggatgcaaaggg

SEQ ID NO: 20514 - RNA, 21 nt, synthetic construct
  source 1..21: mol_type = other RNA
gcctggtgtctcgcgaaacca

SEQ ID NO: 20515 - RNA, 21 nt, synthetic construct
  source 1..21: mol_type = other RNA
gcctgtgtgatagcttccaaa

SEQ ID NO: 20516 - RNA, 21 nt, synthetic construct
  source 1..21: mol_type = other RNA
gccttaatttgtggtggaacc

SEQ ID NO: 20517 - RNA, 21 nt, synthetic construct
  source 1..21: mol_type = other RNA
gccttccatggtctgttgttc

SEQ ID NO: 20518 - RNA, 21 nt, synthetic construct
  source 1..21: mol_type = other RNA
gccttggacaacagtgaaagc

SEQ ID NO: 20519 - RNA, 21 nt, synthetic construct
  source 1..21: mol_type = other RNA
gcgaaaccagacagattggtt

SEQ ID NO: 20520 - RNA, 21 nt, synthetic construct
  source 1..21: mol_type = other RNA
gcgacatgtaaatgtctttat

SEQ ID NO: 20521 - RNA, 21 nt, synthetic construct
  source 1..21: mol_type = other RNA
gcgagacaccaggctacccaa

SEQ ID NO: 20522 - RNA, 21 nt, synthetic construct
  source 1..21: mol_type = other RNA
gcggattatcactacttatca

SEQ ID NO: 20523 - RNA, 21 nt, synthetic construct
  source 1..21: mol_type = other RNA
gcggcccgcgggttagacaac

SEQ ID NO: 20524 - RNA, 21 nt, synthetic construct
  source 1..21: mol_type = other RNA
gcgggccgcatgggacccagg

SEQ ID NO: 20525 - RNA, 21 nt, synthetic construct
  source 1..21: mol_type = other RNA
gcgggttagacaacttgctgt

SEQ ID NO: 20526 - RNA, 21 nt, synthetic construct
  source 1..21: mol_type = other RNA
gcgtgggtcatagtaattctg

SEQ ID NO: 20527 - RNA, 21 nt, synthetic construct
  source 1..21: mol_type = other RNA
gctaagatgcctggtagggat

SEQ ID NO: 20528 - RNA, 21 nt, synthetic construct
  source 1..21: mol_type = other RNA
gctaaggaaaaaggataaaat

SEQ ID NO: 20529 - RNA, 21 nt, synthetic construct
  source 1..21: mol_type = other RNA
gctaagtccaacaaaccattt

SEQ ID NO: 20530 - RNA, 21 nt, synthetic construct
  source 1..21: mol_type = other RNA
gctacactttggtggtgcagc

SEQ ID NO: 20531 - RNA, 21 nt, synthetic construct
  source 1..21: mol_type = other RNA
gctacagctatactgtccaca

SEQ ID NO: 20532 - RNA, 21 nt, synthetic construct
  source 1..21: mol_type = other RNA
gctacatagttaaatatatca

SEQ ID NO: 20533 - RNA, 21 nt, synthetic construct
  source 1..21: mol_type = other RNA
gctacccaagatcaagagagg

SEQ ID NO: 20534 - RNA, 21 nt, synthetic construct
  source 1..21: mol_type = other RNA
gctacccttgctgcttttaat

SEQ ID NO: 20535 - RNA, 21 nt, synthetic construct
  source 1..21: mol_type = other RNA
gctagacatcagagtatacta

SEQ ID NO: 20536 - RNA, 21 nt, synthetic construct
  source 1..21: mol_type = other RNA
gctagtgctatgtctgaatac

SEQ ID NO: 20537 - RNA, 21 nt, synthetic construct
  source 1..21: mol_type = other RNA
gctatactgtccacagttgca

SEQ ID NO: 20538 - RNA, 21 nt, synthetic construct
  source 1..21: mol_type = other RNA
gctatcacacaggcatctgag

SEQ ID NO: 20539 - RNA, 21 nt, synthetic construct
  source 1..21: mol_type = other RNA
gctatgtctgaatactagagg

SEQ ID NO: 20540 - RNA, 21 nt, synthetic construct
  source 1..21: mol_type = other RNA
gctcaagattaataaaatgtc

SEQ ID NO: 20541 - RNA, 21 nt, synthetic construct
  source 1..21: mol_type = other RNA
gctcaagccttaatttgtggt

SEQ ID NO: 20542 - RNA, 21 nt, synthetic construct
  source 1..21: mol_type = other RNA
gctcactccatttacttaaag

SEQ ID NO: 20543 - RNA, 21 nt, synthetic construct
  source 1..21: mol_type = other RNA
gctcagaatagttaaggtaat

SEQ ID NO: 20544 - RNA, 21 nt, synthetic construct
  source 1..21: mol_type = other RNA
gctcaggagtacaagacacta

SEQ ID NO: 20545 - RNA, 21 nt, synthetic construct
  source 1..21: mol_type = other RNA
gctcaggagtcagaagaaaac

SEQ ID NO: 20546 - RNA, 21 nt, synthetic construct
  source 1..21: mol_type = other RNA
gctcagtaaaaagagaaaacc

SEQ ID NO: 20547 - RNA, 21 nt, synthetic construct
  source 1..21: mol_type = other RNA
gctcatcagctgtcctttata

SEQ ID NO: 20548 - RNA, 21 nt, synthetic construct
  source 1..21: mol_type = other RNA
gctccaaaaatgataagtagt

SEQ ID NO: 20549 - RNA, 21 nt, synthetic construct
  source 1..21: mol_type = other RNA
gctcctagtatactctgatgt

SEQ ID NO: 20550 - RNA, 21 nt, synthetic construct
  source 1..21: mol_type = other RNA
gctcctccaatcaagtgtttc

SEQ ID NO: 20551 - RNA, 21 nt, synthetic construct
  source 1..21: mol_type = other RNA
gctcctctagtattcagacat

SEQ ID NO: 20552 - RNA, 21 nt, synthetic construct
  source 1..21: mol_type = other RNA
gctcctgtaacagtttaatgg

SEQ ID NO: 20553 - RNA, 21 nt, synthetic construct
  source 1..21: mol_type = other RNA
gctctaagcatcatatcttga

SEQ ID NO: 20554 - RNA, 21 nt, synthetic construct
  source 1..21: mol_type = other RNA
gctctatcttcctttaggaca

SEQ ID NO: 20555 - RNA, 21 nt, synthetic construct
  source 1..21: mol_type = other RNA
gctctctacccctttgcatcc

SEQ ID NO: 20556 - RNA, 21 nt, synthetic construct
  source 1..21: mol_type = other RNA
gctctctggcccattacattt

SEQ ID NO: 20557 - RNA, 21 nt, synthetic construct
  source 1..21: mol_type = other RNA
gctgaaagctaagtccaacaa

SEQ ID NO: 20558 - RNA, 21 nt, synthetic construct
  source 1..21: mol_type = other RNA
gctgaagctctctggcccatt

SEQ ID NO: 20559 - RNA, 21 nt, synthetic construct
  source 1..21: mol_type = other RNA
gctgatttaaattaccttaac

SEQ ID NO: 20560 - RNA, 21 nt, synthetic construct
  source 1..21: mol_type = other RNA
gctgcaccaccaaagtgtagc

SEQ ID NO: 20561 - RNA, 21 nt, synthetic construct
  source 1..21: mol_type = other RNA
gctgcttttaatcctgcagat

SEQ ID NO: 20562 - RNA, 21 nt, synthetic construct
  source 1..21: mol_type = other RNA
gctgggattctgtccctgacc

SEQ ID NO: 20563 - RNA, 21 nt, synthetic construct
  source 1..21: mol_type = other RNA
gctggggcttgactcttaccc

SEQ ID NO: 20564 - RNA, 21 nt, synthetic construct
  source 1..21: mol_type = other RNA
gctgggtaagagtcaagcccc

SEQ ID NO: 20565 - RNA, 21 nt, synthetic construct
  source 1..21: mol_type = other RNA
gctgggttcatttgtatcaca

SEQ ID NO: 20566 - RNA, 21 nt, synthetic construct
  source 1..21: mol_type = other RNA
gctggtatgactaaagaactg

SEQ ID NO: 20567 - RNA, 21 nt, synthetic construct
  source 1..21: mol_type = other RNA
gctgtaaacagtacaagccag

SEQ ID NO: 20568 - RNA, 21 nt, synthetic construct
  source 1..21: mol_type = other RNA
gctgtagccccggacttgttc

SEQ ID NO: 20569 - RNA, 21 nt, synthetic construct
  source 1..21: mol_type = other RNA
gctgtcctgggtcccatgcgg

SEQ ID NO: 20570 - RNA, 21 nt, synthetic construct
  source 1..21: mol_type = other RNA
gctgtcctttatatgtggccc

SEQ ID NO: 20571 - RNA, 21 nt, synthetic construct
  source 1..21: mol_type = other RNA
gctgtctctgtctttagtgtt

SEQ ID NO: 20572 - RNA, 21 nt, synthetic construct
  source 1..21: mol_type = other RNA
gctgttaaattgaggaaagtc

SEQ ID NO: 20573 - RNA, 21 nt, synthetic construct
  source 1..21: mol_type = other RNA
gcttagagctcctccaatcaa

SEQ ID NO: 20574 - RNA, 21 nt, synthetic construct
  source 1..21: mol_type = other RNA
gcttcagcttttatttcctta

SEQ ID NO: 20575 - RNA, 21 nt, synthetic construct
  source 1..21: mol_type = other RNA
gcttccaaattgctgtctctg

SEQ ID NO: 20576 - RNA, 21 nt, synthetic construct
  source 1..21: mol_type = other RNA
gcttccctccctcaccctctc

SEQ ID NO: 20577 - RNA, 21 nt, synthetic construct
  source 1..21: mol_type = other RNA
gcttccctgggccacactgca

SEQ ID NO: 20578 - RNA, 21 nt, synthetic construct
  source 1..21: mol_type = other RNA
gcttgactcttacccagcagt

SEQ ID NO: 20579 - RNA, 21 nt, synthetic construct
  source 1..21: mol_type = other RNA
gcttgagaaaccagtgcttcc

SEQ ID NO: 20580 - RNA, 21 nt, synthetic construct
  source 1..21: mol_type = other RNA
gcttgagctggggcttgactc

SEQ ID NO: 20581 - RNA, 21 nt, synthetic construct
  source 1..21: mol_type = other RNA
gcttgctttcactgttgtcca

SEQ ID NO: 20582 - RNA, 21 nt, synthetic construct
  source 1..21: mol_type = other RNA
gcttgtactgtttacagcaag

SEQ ID NO: 20583 - RNA, 21 nt, synthetic construct
  source 1..21: mol_type = other RNA
gctttacagagaattggatct

SEQ ID NO: 20584 - RNA, 21 nt, synthetic construct
  source 1..21: mol_type = other RNA
gctttatgtctgtctctagaa

SEQ ID NO: 20585 - RNA, 21 nt, synthetic construct
  source 1..21: mol_type = other RNA
gctttcactgttgtccaaggc

SEQ ID NO: 20586 - RNA, 21 nt, synthetic construct
  source 1..21: mol_type = other RNA
gctttctccctctcttgatct

SEQ ID NO: 20587 - RNA, 21 nt, synthetic construct
  source 1..21: mol_type = other RNA
gcttttaatcctgcagattca

SEQ ID NO: 20588 - RNA, 21 nt, synthetic construct
  source 1..21: mol_type = other RNA
gcttttattcctccctagttc

SEQ ID NO: 20589 - RNA, 21 nt, synthetic construct
  source 1..21: mol_type = other RNA
gcttttatttccttactgctc

SEQ ID NO: 20590 - RNA, 21 nt, synthetic construct
  source 1..21: mol_type = other RNA
gcttttgcttgagaaaccagt

SEQ ID NO: 20591 - RNA, 21 nt, synthetic construct
  source 1..21: mol_type = other RNA
gctttttcatttttcactatt

SEQ ID NO: 20592 - RNA, 21 nt, synthetic construct
  source 1..21: mol_type = other RNA
gctttttgaaggaatagtgtc

SEQ ID NO: 20593 - RNA, 21 nt, synthetic construct
  source 1..21: mol_type = other RNA
gcttttttaaaagggcagttt

SEQ ID NO: 20594 - RNA, 21 nt, synthetic construct
  source 1..21: mol_type = other RNA
ggaaaagtggctggtatgact

SEQ ID NO: 20595 - RNA, 21 nt, synthetic construct
  source 1..21: mol_type = other RNA
ggaaaatagtgaaaaatgaaa

SEQ ID NO: 20596 - RNA, 21 nt, synthetic construct
  source 1..21: mol_type = other RNA
ggaaaatgggatcaagtatga

SEQ ID NO: 20597 - RNA, 21 nt, synthetic construct
  source 1..21: mol_type = other RNA
ggaaacacttgattggaggag

SEQ ID NO: 20598 - RNA, 21 nt, synthetic construct
  source 1..21: mol_type = other RNA
ggaaagtctatccagggacct

SEQ ID NO: 20599 - RNA, 21 nt, synthetic construct
  source 1..21: mol_type = other RNA
ggaaataaaagctgaagctct

SEQ ID NO: 20600 - RNA, 21 nt, synthetic construct
  source 1..21: mol_type = other RNA
ggaaccaatctgtctggtttc

SEQ ID NO: 20601 - RNA, 21 nt, synthetic construct
  source 1..21: mol_type = other RNA
ggaagaaaaagggagatgttg

SEQ ID NO: 20602 - RNA, 21 nt, synthetic construct
  source 1..21: mol_type = other RNA
ggaagatagagcatgaaaatg

SEQ ID NO: 20603 - RNA, 21 nt, synthetic construct
  source 1..21: mol_type = other RNA
ggaagcactggtttctcaagc

SEQ ID NO: 20604 - RNA, 21 nt, synthetic construct
  source 1..21: mol_type = other RNA
ggaagccgaaagattggacac

SEQ ID NO: 20605 - RNA, 21 nt, synthetic construct
  source 1..21: mol_type = other RNA
ggaagctatcacacaggcatc

SEQ ID NO: 20606 - RNA, 21 nt, synthetic construct
  source 1..21: mol_type = other RNA
ggaaggcatgaccaaagggga

SEQ ID NO: 20607 - RNA, 21 nt, synthetic construct
  source 1..21: mol_type = other RNA
ggaagtgaaaacttgtaggac

SEQ ID NO: 20608 - RNA, 21 nt, synthetic construct
  source 1..21: mol_type = other RNA
ggaataaaagcactgctgggt

SEQ ID NO: 20609 - RNA, 21 nt, synthetic construct
  source 1..21: mol_type = other RNA
ggaatagtgtcttgtactcct

SEQ ID NO: 20610 - RNA, 21 nt, synthetic construct
  source 1..21: mol_type = other RNA
ggaatctcacctccctaaaat

SEQ ID NO: 20611 - RNA, 21 nt, synthetic construct
  source 1..21: mol_type = other RNA
ggaatgaattgcagttaccca

SEQ ID NO: 20612 - RNA, 21 nt, synthetic construct
  source 1..21: mol_type = other RNA
ggaatgctacccttgctgctt

SEQ ID NO: 20613 - RNA, 21 nt, synthetic construct
  source 1..21: mol_type = other RNA
ggaattataataccaacattt

SEQ ID NO: 20614 - RNA, 21 nt, synthetic construct
  source 1..21: mol_type = other RNA
ggacaacagtgaaagcaagcg

SEQ ID NO: 20615 - RNA, 21 nt, synthetic construct
  source 1..21: mol_type = other RNA
ggacaatcatcctaacaagat

SEQ ID NO: 20616 - RNA, 21 nt, synthetic construct
  source 1..21: mol_type = other RNA
ggacacccctggtttacagga

SEQ ID NO: 20617 - RNA, 21 nt, synthetic construct
  source 1..21: mol_type = other RNA
ggacagaaatttaggctgggt

SEQ ID NO: 20618 - RNA, 21 nt, synthetic construct
  source 1..21: mol_type = other RNA
ggacagaatcccagctaagga

SEQ ID NO: 20619 - RNA, 21 nt, synthetic construct
  source 1..21: mol_type = other RNA
ggacagtatagctgtagcccc

SEQ ID NO: 20620 - RNA, 21 nt, synthetic construct
  source 1..21: mol_type = other RNA
ggacattgatggttttctctt

SEQ ID NO: 20621 - RNA, 21 nt, synthetic construct
  source 1..21: mol_type = other RNA
ggacccaggacagctttgaat

SEQ ID NO: 20622 - RNA, 21 nt, synthetic construct
  source 1..21: mol_type = other RNA
ggaccttatgcatcacattca

SEQ ID NO: 20623 - RNA, 21 nt, synthetic construct
  source 1..21: mol_type = other RNA
ggactgtgaagacggtcaggg

SEQ ID NO: 20624 - RNA, 21 nt, synthetic construct
  source 1..21: mol_type = other RNA
ggacttagctttcagctaaat

SEQ ID NO: 20625 - RNA, 21 nt, synthetic construct
  source 1..21: mol_type = other RNA
ggacttgttctgtggattaca

SEQ ID NO: 20626 - RNA, 21 nt, synthetic construct
  source 1..21: mol_type = other RNA
ggagaaagctagtgctatgtc

SEQ ID NO: 20627 - RNA, 21 nt, synthetic construct
  source 1..21: mol_type = other RNA
ggagagagggtgagggaggga

SEQ ID NO: 20628 - RNA, 21 nt, synthetic construct
  source 1..21: mol_type = other RNA
ggagagaggtcatatttgtgt

SEQ ID NO: 20629 - RNA, 21 nt, synthetic construct
  source 1..21: mol_type = other RNA
ggagatgacatttgaatctgc

SEQ ID NO: 20630 - RNA, 21 nt, synthetic construct
  source 1..21: mol_type = other RNA
ggagatgttgcctaacctcag

SEQ ID NO: 20631 - RNA, 21 nt, synthetic construct
  source 1..21: mol_type = other RNA
ggagcaagtacaacaaatgga

SEQ ID NO: 20632 - RNA, 21 nt, synthetic construct
  source 1..21: mol_type = other RNA
ggagcatttttctagagacag

SEQ ID NO: 20633 - RNA, 21 nt, synthetic construct
  source 1..21: mol_type = other RNA
ggagctacatagttaaatata

SEQ ID NO: 20634 - RNA, 21 nt, synthetic construct
  source 1..21: mol_type = other RNA
ggagctcaggagtacaagaca

SEQ ID NO: 20635 - RNA, 21 nt, synthetic construct
  source 1..21: mol_type = other RNA
ggagctctaagcatcatatct

SEQ ID NO: 20636 - RNA, 21 nt, synthetic construct
  source 1..21: mol_type = other RNA
ggaggaataaaagcactgctg

SEQ ID NO: 20637 - RNA, 21 nt, synthetic construct
  source 1..21: mol_type = other RNA
ggaggagctctaagcatcata

SEQ ID NO: 20638 - RNA, 21 nt, synthetic construct
  source 1..21: mol_type = other RNA
ggagggaagcactggtttctc

SEQ ID NO: 20639 - RNA, 21 nt, synthetic construct
  source 1..21: mol_type = other RNA
ggaggtgagattccattaaac

SEQ ID NO: 20640 - RNA, 21 nt, synthetic construct
  source 1..21: mol_type = other RNA
ggagtacaagacactattcct

SEQ ID NO: 20641 - RNA, 21 nt, synthetic construct
  source 1..21: mol_type = other RNA
ggagtcagaagaaaactgctt

SEQ ID NO: 20642 - RNA, 21 nt, synthetic construct
  source 1..21: mol_type = other RNA
ggagtgagcgacatgtaaatg

SEQ ID NO: 20643 - RNA, 21 nt, synthetic construct
  source 1..21: mol_type = other RNA
ggagtttcacctgtcattttc

SEQ ID NO: 20644 - RNA, 21 nt, synthetic construct
  source 1..21: mol_type = other RNA
ggataaaacttactttgtgat

SEQ ID NO: 20645 - RNA, 21 nt, synthetic construct
  source 1..21: mol_type = other RNA
ggatagactttcctcaattta

SEQ ID NO: 20646 - RNA, 21 nt, synthetic construct
  source 1..21: mol_type = other RNA
ggatcaaaagataacactaaa

SEQ ID NO: 20647 - RNA, 21 nt, synthetic construct
  source 1..21: mol_type = other RNA
ggatcaagtatgagtgagagt

SEQ ID NO: 20648 - RNA, 21 nt, synthetic construct
  source 1..21: mol_type = other RNA
ggatctgaggttaggcaacat

SEQ ID NO: 20649 - RNA, 21 nt, synthetic construct
  source 1..21: mol_type = other RNA
ggatgaattctgttctcgtga

SEQ ID NO: 20650 - RNA, 21 nt, synthetic construct
  source 1..21: mol_type = other RNA
ggatgattgtcctaaaggaag

SEQ ID NO: 20651 - RNA, 21 nt, synthetic construct
  source 1..21: mol_type = other RNA
ggatgcaaaggggtagagagc

SEQ ID NO: 20652 - RNA, 21 nt, synthetic construct
  source 1..21: mol_type = other RNA
ggattaaaagcagcaagggta

SEQ ID NO: 20653 - RNA, 21 nt, synthetic construct
  source 1..21: mol_type = other RNA
ggattacagaatacgtggaca

SEQ ID NO: 20654 - RNA, 21 nt, synthetic construct
  source 1..21: mol_type = other RNA
ggattatcactacttatcatt

SEQ ID NO: 20655 - RNA, 21 nt, synthetic construct
  source 1..21: mol_type = other RNA
ggattctgtccctgaccgtct

SEQ ID NO: 20656 - RNA, 21 nt, synthetic construct
  source 1..21: mol_type = other RNA
ggcaacatctccctttttctt

SEQ ID NO: 20657 - RNA, 21 nt, synthetic construct
  source 1..21: mol_type = other RNA
ggcacatctttaaaaatggtt

SEQ ID NO: 20658 - RNA, 21 nt, synthetic construct
  source 1..21: mol_type = other RNA
ggcaggcacatctttaaaaat

SEQ ID NO: 20659 - RNA, 21 nt, synthetic construct
  source 1..21: mol_type = other RNA
ggcagtttgggtcatagaaca

SEQ ID NO: 20660 - RNA, 21 nt, synthetic construct
  source 1..21: mol_type = other RNA
ggcatctgagatcagttacta

SEQ ID NO: 20661 - RNA, 21 nt, synthetic construct
  source 1..21: mol_type = other RNA
ggcatcttagcaactctcact

SEQ ID NO: 20662 - RNA, 21 nt, synthetic construct
  source 1..21: mol_type = other RNA
ggcatgaccaaaggggagatg

SEQ ID NO: 20663 - RNA, 21 nt, synthetic construct
  source 1..21: mol_type = other RNA
ggccacactgcaagaactgtc

SEQ ID NO: 20664 - RNA, 21 nt, synthetic construct
  source 1..21: mol_type = other RNA
ggccacatataaaggacagct

SEQ ID NO: 20665 - RNA, 21 nt, synthetic construct
  source 1..21: mol_type = other RNA
ggccagagagcttcagctttt

SEQ ID NO: 20666 - RNA, 21 nt, synthetic construct
  source 1..21: mol_type = other RNA
ggcccaagacagttcttgcag

SEQ ID NO: 20667 - RNA, 21 nt, synthetic construct
  source 1..21: mol_type = other RNA
ggcccattacatttcatttaa

SEQ ID NO: 20668 - RNA, 21 nt, synthetic construct
  source 1..21: mol_type = other RNA
ggcccgcgggttagacaactt

SEQ ID NO: 20669 - RNA, 21 nt, synthetic construct
  source 1..21: mol_type = other RNA
ggccgcatgggacccaggaca

SEQ ID NO: 20670 - RNA, 21 nt, synthetic construct
  source 1..21: mol_type = other RNA
ggctacagctatactgtccac

SEQ ID NO: 20671 - RNA, 21 nt, synthetic construct
  source 1..21: mol_type = other RNA
ggctacccaagatcaagagag

SEQ ID NO: 20672 - RNA, 21 nt, synthetic construct
  source 1..21: mol_type = other RNA
ggctagacatcagagtatact

SEQ ID NO: 20673 - RNA, 21 nt, synthetic construct
  source 1..21: mol_type = other RNA
ggctctctacccctttgcatc

SEQ ID NO: 20674 - RNA, 21 nt, synthetic construct
  source 1..21: mol_type = other RNA
ggctgggttcatttgtatcac

SEQ ID NO: 20675 - RNA, 21 nt, synthetic construct
  source 1..21: mol_type = other RNA
ggctggtatgactaaagaact

SEQ ID NO: 20676 - RNA, 21 nt, synthetic construct
  source 1..21: mol_type = other RNA
ggcttccctgggccacactgc

SEQ ID NO: 20677 - RNA, 21 nt, synthetic construct
  source 1..21: mol_type = other RNA
ggcttgactcttacccagcag

SEQ ID NO: 20678 - RNA, 21 nt, synthetic construct
  source 1..21: mol_type = other RNA
ggcttgagctggggcttgact

SEQ ID NO: 20679 - RNA, 21 nt, synthetic construct
  source 1..21: mol_type = other RNA
ggcttgtactgtttacagcaa

SEQ ID NO: 20680 - RNA, 21 nt, synthetic construct
  source 1..21: mol_type = other RNA
gggaagcactggtttctcaag

SEQ ID NO: 20681 - RNA, 21 nt, synthetic construct
  source 1..21: mol_type = other RNA
gggacagaatcccagctaagg

SEQ ID NO: 20682 - RNA, 21 nt, synthetic construct
  source 1..21: mol_type = other RNA
gggacccaggacagctttgaa

SEQ ID NO: 20683 - RNA, 21 nt, synthetic construct
  source 1..21: mol_type = other RNA
gggaccttatgcatcacattc

SEQ ID NO: 20684 - RNA, 21 nt, synthetic construct
  source 1..21: mol_type = other RNA
gggagaaagctagtgctatgt

SEQ ID NO: 20685 - RNA, 21 nt, synthetic construct
  source 1..21: mol_type = other RNA
gggagagagggtgagggaggg

SEQ ID NO: 20686 - RNA, 21 nt, synthetic construct
  source 1..21: mol_type = other RNA
gggagatgacatttgaatctg

SEQ ID NO: 20687 - RNA, 21 nt, synthetic construct
  source 1..21: mol_type = other RNA
gggagatgttgcctaacctca

SEQ ID NO: 20688 - RNA, 21 nt, synthetic construct
  source 1..21: mol_type = other RNA
gggaggaataaaagcactgct

SEQ ID NO: 20689 - RNA, 21 nt, synthetic construct
  source 1..21: mol_type = other RNA
gggagggaagcactggtttct

SEQ ID NO: 20690 - RNA, 21 nt, synthetic construct
  source 1..21: mol_type = other RNA
gggaggtgagattccattaaa

SEQ ID NO: 20691 - RNA, 21 nt, synthetic construct
  source 1..21: mol_type = other RNA
gggatcaagtatgagtgagag

SEQ ID NO: 20692 - RNA, 21 nt, synthetic construct
  source 1..21: mol_type = other RNA
gggatgcaaaggggtagagag

SEQ ID NO: 20693 - RNA, 21 nt, synthetic construct
  source 1..21: mol_type = other RNA
gggattctgtccctgaccgtc

SEQ ID NO: 20694 - RNA, 21 nt, synthetic construct
  source 1..21: mol_type = other RNA
gggcagtttgggtcatagaac

SEQ ID NO: 20695 - RNA, 21 nt, synthetic construct
  source 1..21: mol_type = other RNA
gggccacactgcaagaactgt

SEQ ID NO: 20696 - RNA, 21 nt, synthetic construct
  source 1..21: mol_type = other RNA
gggccacatataaaggacagc

SEQ ID NO: 20697 - RNA, 21 nt, synthetic construct
  source 1..21: mol_type = other RNA
gggccagagagcttcagcttt

SEQ ID NO: 20698 - RNA, 21 nt, synthetic construct
  source 1..21: mol_type = other RNA
gggccgcatgggacccaggac

SEQ ID NO: 20699 - RNA, 21 nt, synthetic construct
  source 1..21: mol_type = other RNA
gggctacagctatactgtcca

SEQ ID NO: 20700 - RNA, 21 nt, synthetic construct
  source 1..21: mol_type = other RNA
gggcttgactcttacccagca

SEQ ID NO: 20701 - RNA, 21 nt, synthetic construct
  source 1..21: mol_type = other RNA
ggggagagagggtgagggagg

SEQ ID NO: 20702 - RNA, 21 nt, synthetic construct
  source 1..21: mol_type = other RNA
ggggagatgacatttgaatct

SEQ ID NO: 20703 - RNA, 21 nt, synthetic construct
  source 1..21: mol_type = other RNA
ggggctacagctatactgtcc

SEQ ID NO: 20704 - RNA, 21 nt, synthetic construct
  source 1..21: mol_type = other RNA
ggggcttgactcttacccagc

SEQ ID NO: 20705 - RNA, 21 nt, synthetic construct
  source 1..21: mol_type = other RNA
ggggtagagagcctggggaga

SEQ ID NO: 20706 - RNA, 21 nt, synthetic construct
  source 1..21: mol_type = other RNA
ggggtggttctttttggaatg

SEQ ID NO: 20707 - RNA, 21 nt, synthetic construct
  source 1..21: mol_type = other RNA
ggggttgttgtcattgctgat

SEQ ID NO: 20708 - RNA, 21 nt, synthetic construct
  source 1..21: mol_type = other RNA
gggtaactgcaattcattcca

SEQ ID NO: 20709 - RNA, 21 nt, synthetic construct
  source 1..21: mol_type = other RNA
gggtaagagtcaagccccagc

SEQ ID NO: 20710 - RNA, 21 nt, synthetic construct
  source 1..21: mol_type = other RNA
gggtagagagcctggggagag

SEQ ID NO: 20711 - RNA, 21 nt, synthetic construct
  source 1..21: mol_type = other RNA
gggtagcattccaaaaagaac

SEQ ID NO: 20712 - RNA, 21 nt, synthetic construct
  source 1..21: mol_type = other RNA
gggtagcctggtgtctcgcga

SEQ ID NO: 20713 - RNA, 21 nt, synthetic construct
  source 1..21: mol_type = other RNA
gggtcatagaacaacagacca

SEQ ID NO: 20714 - RNA, 21 nt, synthetic construct
  source 1..21: mol_type = other RNA
gggtcatagtaattctggggt

SEQ ID NO: 20715 - RNA, 21 nt, synthetic construct
  source 1..21: mol_type = other RNA
gggtcccatgcggcccgcggg

SEQ ID NO: 20716 - RNA, 21 nt, synthetic construct
  source 1..21: mol_type = other RNA
gggtcgcattcaaagctgtcc

SEQ ID NO: 20717 - RNA, 21 nt, synthetic construct
  source 1..21: mol_type = other RNA
gggtctcaaatggtataaaac

SEQ ID NO: 20718 - RNA, 21 nt, synthetic construct
  source 1..21: mol_type = other RNA
gggtgagggagggaagcactg

SEQ ID NO: 20719 - RNA, 21 nt, synthetic construct
  source 1..21: mol_type = other RNA
gggtggttctttttggaatgc

SEQ ID NO: 20720 - RNA, 21 nt, synthetic construct
  source 1..21: mol_type = other RNA
gggttagacaacttgctgtaa

SEQ ID NO: 20721 - RNA, 21 nt, synthetic construct
  source 1..21: mol_type = other RNA
gggttcatttgtatcacacag

SEQ ID NO: 20722 - RNA, 21 nt, synthetic construct
  source 1..21: mol_type = other RNA
gggttgttgtcattgctgatt

SEQ ID NO: 20723 - RNA, 21 nt, synthetic construct
  source 1..21: mol_type = other RNA
ggtaactgcaattcattccat

SEQ ID NO: 20724 - RNA, 21 nt, synthetic construct
  source 1..21: mol_type = other RNA
ggtaagaacagaaatgagagg

SEQ ID NO: 20725 - RNA, 21 nt, synthetic construct
  source 1..21: mol_type = other RNA
ggtaagagtcaagccccagct

SEQ ID NO: 20726 - RNA, 21 nt, synthetic construct
  source 1..21: mol_type = other RNA
ggtaatttaaatcagcaatga

SEQ ID NO: 20727 - RNA, 21 nt, synthetic construct
  source 1..21: mol_type = other RNA
ggtagagagcctggggagaga

SEQ ID NO: 20728 - RNA, 21 nt, synthetic construct
  source 1..21: mol_type = other RNA
ggtagcattccaaaaagaacc

SEQ ID NO: 20729 - RNA, 21 nt, synthetic construct
  source 1..21: mol_type = other RNA
ggtagcctggtgtctcgcgaa

SEQ ID NO: 20730 - RNA, 21 nt, synthetic construct
  source 1..21: mol_type = other RNA
ggtagggatgcaaaggggtag

SEQ ID NO: 20731 - RNA, 21 nt, synthetic construct
  source 1..21: mol_type = other RNA
ggtataaaactcaggtgatca

SEQ ID NO: 20732 - RNA, 21 nt, synthetic construct
  source 1..21: mol_type = other RNA
ggtattataattcctcaggat

SEQ ID NO: 20733 - RNA, 21 nt, synthetic construct
  source 1..21: mol_type = other RNA
ggtatttagaggaagaaaaag

SEQ ID NO: 20734 - RNA, 21 nt, synthetic construct
  source 1..21: mol_type = other RNA
ggtcagggacagaatcccagc

SEQ ID NO: 20735 - RNA, 21 nt, synthetic construct
  source 1..21: mol_type = other RNA
ggtcatagaacaacagaccat

SEQ ID NO: 20736 - RNA, 21 nt, synthetic construct
  source 1..21: mol_type = other RNA
ggtcatagtaattctggggtt

SEQ ID NO: 20737 - RNA, 21 nt, synthetic construct
  source 1..21: mol_type = other RNA
ggtcatatttgtgtgtgtagt

SEQ ID NO: 20738 - RNA, 21 nt, synthetic construct
  source 1..21: mol_type = other RNA
ggtcatgccttccatggtctg

SEQ ID NO: 20739 - RNA, 21 nt, synthetic construct
  source 1..21: mol_type = other RNA
ggtcccatgcggcccgcgggt

SEQ ID NO: 20740 - RNA, 21 nt, synthetic construct
  source 1..21: mol_type = other RNA
ggtccctggatagactttcct

SEQ ID NO: 20741 - RNA, 21 nt, synthetic construct
  source 1..21: mol_type = other RNA
ggtcgcattcaaagctgtcct

SEQ ID NO: 20742 - RNA, 21 nt, synthetic construct
  source 1..21: mol_type = other RNA
ggtctcaaatggtataaaact

SEQ ID NO: 20743 - RNA, 21 nt, synthetic construct
  source 1..21: mol_type = other RNA
ggtctgtgtgatacaaatgaa

SEQ ID NO: 20744 - RNA, 21 nt, synthetic construct
  source 1..21: mol_type = other RNA
ggtctgttgttctatgaccca

SEQ ID NO: 20745 - RNA, 21 nt, synthetic construct
  source 1..21: mol_type = other RNA
ggtgaaactccattactggct

SEQ ID NO: 20746 - RNA, 21 nt, synthetic construct
  source 1..21: mol_type = other RNA
ggtgagattccattaaactgt

SEQ ID NO: 20747 - RNA, 21 nt, synthetic construct
  source 1..21: mol_type = other RNA
ggtgagggagggaagcactgg

SEQ ID NO: 20748 - RNA, 21 nt, synthetic construct
  source 1..21: mol_type = other RNA
ggtgatcatgctttatgtctg

SEQ ID NO: 20749 - RNA, 21 nt, synthetic construct
  source 1..21: mol_type = other RNA
ggtgatcttgactactgcttt

SEQ ID NO: 20750 - RNA, 21 nt, synthetic construct
  source 1..21: mol_type = other RNA
ggtgcagcaagggtctcaaat

SEQ ID NO: 20751 - RNA, 21 nt, synthetic construct
  source 1..21: mol_type = other RNA
ggtggaaccaatctgtctggt

SEQ ID NO: 20752 - RNA, 21 nt, synthetic construct
  source 1..21: mol_type = other RNA
ggtggtgcagcaagggtctca

SEQ ID NO: 20753 - RNA, 21 nt, synthetic construct
  source 1..21: mol_type = other RNA
ggtggttctttttggaatgct

SEQ ID NO: 20754 - RNA, 21 nt, synthetic construct
  source 1..21: mol_type = other RNA
ggtgtctcgcgaaaccagaca

SEQ ID NO: 20755 - RNA, 21 nt, synthetic construct
  source 1..21: mol_type = other RNA
ggtgttaaaatgttggtatta

SEQ ID NO: 20756 - RNA, 21 nt, synthetic construct
  source 1..21: mol_type = other RNA
ggttagacaacttgctgtaaa

SEQ ID NO: 20757 - RNA, 21 nt, synthetic construct
  source 1..21: mol_type = other RNA
ggttaggcaacatctcccttt

SEQ ID NO: 20758 - RNA, 21 nt, synthetic construct
  source 1..21: mol_type = other RNA
ggttcatttgtatcacacaga

SEQ ID NO: 20759 - RNA, 21 nt, synthetic construct
  source 1..21: mol_type = other RNA
ggttccaccacaaattaaggc

SEQ ID NO: 20760 - RNA, 21 nt, synthetic construct
  source 1..21: mol_type = other RNA
ggttctttttggaatgctacc

SEQ ID NO: 20761 - RNA, 21 nt, synthetic construct
  source 1..21: mol_type = other RNA
ggttgttgtcattgctgattt

SEQ ID NO: 20762 - RNA, 21 nt, synthetic construct
  source 1..21: mol_type = other RNA
ggtttacaggatgaattctgt

SEQ ID NO: 20763 - RNA, 21 nt, synthetic construct
  source 1..21: mol_type = other RNA
ggtttcgcgagacaccaggct

SEQ ID NO: 20764 - RNA, 21 nt, synthetic construct
  source 1..21: mol_type = other RNA
ggtttctcaagcaaaagctaa

SEQ ID NO: 20765 - RNA, 21 nt, synthetic construct
  source 1..21: mol_type = other RNA
ggtttgacattttattaatct

SEQ ID NO: 20766 - RNA, 21 nt, synthetic construct
  source 1..21: mol_type = other RNA
ggtttgttggacttagctttc

SEQ ID NO: 20767 - RNA, 21 nt, synthetic construct
  source 1..21: mol_type = other RNA
ggttttctctttttactgagc

SEQ ID NO: 20768 - RNA, 21 nt, synthetic construct
  source 1..21: mol_type = other RNA
gtaaaaagagaaaaccatcaa

SEQ ID NO: 20769 - RNA, 21 nt, synthetic construct
  source 1..21: mol_type = other RNA
gtaaacagtacaagccagtaa

SEQ ID NO: 20770 - RNA, 21 nt, synthetic construct
  source 1..21: mol_type = other RNA
gtaaaccaggggtgtccaatc

SEQ ID NO: 20771 - RNA, 21 nt, synthetic construct
  source 1..21: mol_type = other RNA
gtaaagcagtagtcaagatca

SEQ ID NO: 20772 - RNA, 21 nt, synthetic construct
  source 1..21: mol_type = other RNA
gtaaatggagtgagcgacatg

SEQ ID NO: 20773 - RNA, 21 nt, synthetic construct
  source 1..21: mol_type = other RNA
gtaacagtttaatggaatctc

SEQ ID NO: 20774 - RNA, 21 nt, synthetic construct
  source 1..21: mol_type = other RNA
gtaactgatctcagatgcctg

SEQ ID NO: 20775 - RNA, 21 nt, synthetic construct
  source 1..21: mol_type = other RNA
gtaactgcaattcattccatg

SEQ ID NO: 20776 - RNA, 21 nt, synthetic construct
  source 1..21: mol_type = other RNA
gtaagaacagaaatgagaggt

SEQ ID NO: 20777 - RNA, 21 nt, synthetic construct
  source 1..21: mol_type = other RNA
gtaagagtcaagccccagctc

SEQ ID NO: 20778 - RNA, 21 nt, synthetic construct
  source 1..21: mol_type = other RNA
gtaagatggatcaaaagataa

SEQ ID NO: 20779 - RNA, 21 nt, synthetic construct
  source 1..21: mol_type = other RNA
gtaaggaaataaaagctgaag

SEQ ID NO: 20780 - RNA, 21 nt, synthetic construct
  source 1..21: mol_type = other RNA
gtaagttttatcctgaggaat

SEQ ID NO: 20781 - RNA, 21 nt, synthetic construct
  source 1..21: mol_type = other RNA
gtaatccacagaacaagtccg

SEQ ID NO: 20782 - RNA, 21 nt, synthetic construct
  source 1..21: mol_type = other RNA
gtaatggagtttcacctgtca

SEQ ID NO: 20783 - RNA, 21 nt, synthetic construct
  source 1..21: mol_type = other RNA
gtaatgggccagagagcttca

SEQ ID NO: 20784 - RNA, 21 nt, synthetic construct
  source 1..21: mol_type = other RNA
gtaattctggggttgttgtca

SEQ ID NO: 20785 - RNA, 21 nt, synthetic construct
  source 1..21: mol_type = other RNA
gtaatttaaatcagcaatgac

SEQ ID NO: 20786 - RNA, 21 nt, synthetic construct
  source 1..21: mol_type = other RNA
gtacaaactgctcaggagtca

SEQ ID NO: 20787 - RNA, 21 nt, synthetic construct
  source 1..21: mol_type = other RNA
gtacaacaaatggaaaatggg

SEQ ID NO: 20788 - RNA, 21 nt, synthetic construct
  source 1..21: mol_type = other RNA
gtacaagacactattccttca

SEQ ID NO: 20789 - RNA, 21 nt, synthetic construct
  source 1..21: mol_type = other RNA
gtacaagccagtaatggagtt

SEQ ID NO: 20790 - RNA, 21 nt, synthetic construct
  source 1..21: mol_type = other RNA
gtactcctgagctcctagtat

SEQ ID NO: 20791 - RNA, 21 nt, synthetic construct
  source 1..21: mol_type = other RNA
gtactgcgtgggtcatagtaa

SEQ ID NO: 20792 - RNA, 21 nt, synthetic construct
  source 1..21: mol_type = other RNA
gtactgtttacagcaagttgt

SEQ ID NO: 20793 - RNA, 21 nt, synthetic construct
  source 1..21: mol_type = other RNA
gtacttgctcctctagtattc

SEQ ID NO: 20794 - RNA, 21 nt, synthetic construct
  source 1..21: mol_type = other RNA
gtagagagcctggggagagag

SEQ ID NO: 20795 - RNA, 21 nt, synthetic construct
  source 1..21: mol_type = other RNA
gtagcatcaggttaaatctta

SEQ ID NO: 20796 - RNA, 21 nt, synthetic construct
  source 1..21: mol_type = other RNA
gtagcattccaaaaagaacca

SEQ ID NO: 20797 - RNA, 21 nt, synthetic construct
  source 1..21: mol_type = other RNA
gtagccccggacttgttctgt

SEQ ID NO: 20798 - RNA, 21 nt, synthetic construct
  source 1..21: mol_type = other RNA
gtagcctggtgtctcgcgaaa

SEQ ID NO: 20799 - RNA, 21 nt, synthetic construct
  source 1..21: mol_type = other RNA
gtagctcctgtaacagtttaa

SEQ ID NO: 20800 - RNA, 21 nt, synthetic construct
  source 1..21: mol_type = other RNA
gtaggacagaaatttaggctg

SEQ ID NO: 20801 - RNA, 21 nt, synthetic construct
  source 1..21: mol_type = other RNA
gtagggatgcaaaggggtaga

SEQ ID NO: 20802 - RNA, 21 nt, synthetic construct
  source 1..21: mol_type = other RNA
gtagtatgtggaaaatagtga

SEQ ID NO: 20803 - RNA, 21 nt, synthetic construct
  source 1..21: mol_type = other RNA
gtagtcaagatcacctggact

SEQ ID NO: 20804 - RNA, 21 nt, synthetic construct
  source 1..21: mol_type = other RNA
gtataaaactcaggtgatcat

SEQ ID NO: 20805 - RNA, 21 nt, synthetic construct
  source 1..21: mol_type = other RNA
gtatactaggagctcaggagt

SEQ ID NO: 20806 - RNA, 21 nt, synthetic construct
  source 1..21: mol_type = other RNA
gtatactctgatgtctagcca

SEQ ID NO: 20807 - RNA, 21 nt, synthetic construct
  source 1..21: mol_type = other RNA
gtatagctgtagccccggact

SEQ ID NO: 20808 - RNA, 21 nt, synthetic construct
  source 1..21: mol_type = other RNA
gtatcacacagacctattctt

SEQ ID NO: 20809 - RNA, 21 nt, synthetic construct
  source 1..21: mol_type = other RNA
gtatgagtgagagttgctaag

SEQ ID NO: 20810 - RNA, 21 nt, synthetic construct
  source 1..21: mol_type = other RNA
gtattagcaatataaaaagca

SEQ ID NO: 20811 - RNA, 21 nt, synthetic construct
  source 1..21: mol_type = other RNA
gtattataattcctcaggata

SEQ ID NO: 20812 - RNA, 21 nt, synthetic construct
  source 1..21: mol_type = other RNA
gtattcagacatagcactagc

SEQ ID NO: 20813 - RNA, 21 nt, synthetic construct
  source 1..21: mol_type = other RNA
gtattctgtaatccacagaac

SEQ ID NO: 20814 - RNA, 21 nt, synthetic construct
  source 1..21: mol_type = other RNA
gtatttagaggaagaaaaagg

SEQ ID NO: 20815 - RNA, 21 nt, synthetic construct
  source 1..21: mol_type = other RNA
gtcaaaccataaagacattta

SEQ ID NO: 20816 - RNA, 21 nt, synthetic construct
  source 1..21: mol_type = other RNA
gtcaagatcacctggactgtg

SEQ ID NO: 20817 - RNA, 21 nt, synthetic construct
  source 1..21: mol_type = other RNA
gtcaagccccagctcaagcct

SEQ ID NO: 20818 - RNA, 21 nt, synthetic construct
  source 1..21: mol_type = other RNA
gtcacatggaatgaattgcag

SEQ ID NO: 20819 - RNA, 21 nt, synthetic construct
  source 1..21: mol_type = other RNA
gtcagaagaaaactgcttttt

SEQ ID NO: 20820 - RNA, 21 nt, synthetic construct
  source 1..21: mol_type = other RNA
gtcagggacagaatcccagct

SEQ ID NO: 20821 - RNA, 21 nt, synthetic construct
  source 1..21: mol_type = other RNA
gtcataccagccacttttcca

SEQ ID NO: 20822 - RNA, 21 nt, synthetic construct
  source 1..21: mol_type = other RNA
gtcatagaacaacagaccatg

SEQ ID NO: 20823 - RNA, 21 nt, synthetic construct
  source 1..21: mol_type = other RNA
gtcatagtaattctggggttg

SEQ ID NO: 20824 - RNA, 21 nt, synthetic construct
  source 1..21: mol_type = other RNA
gtcatatatctttgtggggtg

SEQ ID NO: 20825 - RNA, 21 nt, synthetic construct
  source 1..21: mol_type = other RNA
gtcatatttgtgtgtgtagta

SEQ ID NO: 20826 - RNA, 21 nt, synthetic construct
  source 1..21: mol_type = other RNA
gtcatctcccctttggtcatg

SEQ ID NO: 20827 - RNA, 21 nt, synthetic construct
  source 1..21: mol_type = other RNA
gtcatgccttccatggtctgt

SEQ ID NO: 20828 - RNA, 21 nt, synthetic construct
  source 1..21: mol_type = other RNA
gtcattgctgatttaaattac

SEQ ID NO: 20829 - RNA, 21 nt, synthetic construct
  source 1..21: mol_type = other RNA
gtcattttcatgctctatctt

SEQ ID NO: 20830 - RNA, 21 nt, synthetic construct
  source 1..21: mol_type = other RNA
gtccaacaaaccatttttaaa

SEQ ID NO: 20831 - RNA, 21 nt, synthetic construct
  source 1..21: mol_type = other RNA
gtccaaggcaggcacatcttt

SEQ ID NO: 20832 - RNA, 21 nt, synthetic construct
  source 1..21: mol_type = other RNA
gtccacagttgcaattcaaat

SEQ ID NO: 20833 - RNA, 21 nt, synthetic construct
  source 1..21: mol_type = other RNA
gtccacgtattctgtaatcca

SEQ ID NO: 20834 - RNA, 21 nt, synthetic construct
  source 1..21: mol_type = other RNA
gtccaggtgatcttgactact

SEQ ID NO: 20835 - RNA, 21 nt, synthetic construct
  source 1..21: mol_type = other RNA
gtcccatgcggcccgcgggtt

SEQ ID NO: 20836 - RNA, 21 nt, synthetic construct
  source 1..21: mol_type = other RNA
gtccctgaccgtcttcacagt

SEQ ID NO: 20837 - RNA, 21 nt, synthetic construct
  source 1..21: mol_type = other RNA
gtccctggatagactttcctc

SEQ ID NO: 20838 - RNA, 21 nt, synthetic construct
  source 1..21: mol_type = other RNA
gtccggggctacagctatact

SEQ ID NO: 20839 - RNA, 21 nt, synthetic construct
  source 1..21: mol_type = other RNA
gtcctaaaggaagatagagca

SEQ ID NO: 20840 - RNA, 21 nt, synthetic construct
  source 1..21: mol_type = other RNA
gtcctacaagttttcacttcc

SEQ ID NO: 20841 - RNA, 21 nt, synthetic construct
  source 1..21: mol_type = other RNA
gtcctgggtcccatgcggccc

SEQ ID NO: 20842 - RNA, 21 nt, synthetic construct
  source 1..21: mol_type = other RNA
gtcctttatatgtggcccaag

SEQ ID NO: 20843 - RNA, 21 nt, synthetic construct
  source 1..21: mol_type = other RNA
gtcgcattcaaagctgtcctg

SEQ ID NO: 20844 - RNA, 21 nt, synthetic construct
  source 1..21: mol_type = other RNA
gtcgctcactccatttactta

SEQ ID NO: 20845 - RNA, 21 nt, synthetic construct
  source 1..21: mol_type = other RNA
gtctaacccgcgggccgcatg

SEQ ID NO: 20846 - RNA, 21 nt, synthetic construct
  source 1..21: mol_type = other RNA
gtctagccaactttaagtaaa

SEQ ID NO: 20847 - RNA, 21 nt, synthetic construct
  source 1..21: mol_type = other RNA
gtctatccagggaccttatgc

SEQ ID NO: 20848 - RNA, 21 nt, synthetic construct
  source 1..21: mol_type = other RNA
gtctcaaatggtataaaactc

SEQ ID NO: 20849 - RNA, 21 nt, synthetic construct
  source 1..21: mol_type = other RNA
gtctcgcgaaaccagacagat

SEQ ID NO: 20850 - RNA, 21 nt, synthetic construct
  source 1..21: mol_type = other RNA
gtctctagaaaaatgctccaa

SEQ ID NO: 20851 - RNA, 21 nt, synthetic construct
  source 1..21: mol_type = other RNA
gtctctatgatttgggtaact

SEQ ID NO: 20852 - RNA, 21 nt, synthetic construct
  source 1..21: mol_type = other RNA
gtctctgtctttagtgttatc

SEQ ID NO: 20853 - RNA, 21 nt, synthetic construct
  source 1..21: mol_type = other RNA
gtctgaatactagaggagcaa

SEQ ID NO: 20854 - RNA, 21 nt, synthetic construct
  source 1..21: mol_type = other RNA
gtctggtttcgcgagacacca

SEQ ID NO: 20855 - RNA, 21 nt, synthetic construct
  source 1..21: mol_type = other RNA
gtctgtctctagaaaaatgct

SEQ ID NO: 20856 - RNA, 21 nt, synthetic construct
  source 1..21: mol_type = other RNA
gtctgtgtgatacaaatgaac

SEQ ID NO: 20857 - RNA, 21 nt, synthetic construct
  source 1..21: mol_type = other RNA
gtctgttgttctatgacccaa

SEQ ID NO: 20858 - RNA, 21 nt, synthetic construct
  source 1..21: mol_type = other RNA
gtcttcacagtccaggtgatc

SEQ ID NO: 20859 - RNA, 21 nt, synthetic construct
  source 1..21: mol_type = other RNA
gtcttgggccacatataaagg

SEQ ID NO: 20860 - RNA, 21 nt, synthetic construct
  source 1..21: mol_type = other RNA
gtcttgtactcctgagctcct

SEQ ID NO: 20861 - RNA, 21 nt, synthetic construct
  source 1..21: mol_type = other RNA
gtctttagtgttatcttttga

SEQ ID NO: 20862 - RNA, 21 nt, synthetic construct
  source 1..21: mol_type = other RNA
gtgaaaaatgaaaaagctgtt

SEQ ID NO: 20863 - RNA, 21 nt, synthetic construct
  source 1..21: mol_type = other RNA
gtgaaaacttgtaggacagaa

SEQ ID NO: 20864 - RNA, 21 nt, synthetic construct
  source 1..21: mol_type = other RNA
gtgaaactccattactggctt

SEQ ID NO: 20865 - RNA, 21 nt, synthetic construct
  source 1..21: mol_type = other RNA
gtgaaagcaagcgttaatgag

SEQ ID NO: 20866 - RNA, 21 nt, synthetic construct
  source 1..21: mol_type = other RNA
gtgaactagggaggaataaaa

SEQ ID NO: 20867 - RNA, 21 nt, synthetic construct
  source 1..21: mol_type = other RNA
gtgaagacggtcagggacaga

SEQ ID NO: 20868 - RNA, 21 nt, synthetic construct
  source 1..21: mol_type = other RNA
gtgaatgtgatgcataaggtc

SEQ ID NO: 20869 - RNA, 21 nt, synthetic construct
  source 1..21: mol_type = other RNA
gtgacttcaggagagaggtca

SEQ ID NO: 20870 - RNA, 21 nt, synthetic construct
  source 1..21: mol_type = other RNA
gtgagagttgctaagatgcct

SEQ ID NO: 20871 - RNA, 21 nt, synthetic construct
  source 1..21: mol_type = other RNA
gtgagattccattaaactgtt

SEQ ID NO: 20872 - RNA, 21 nt, synthetic construct
  source 1..21: mol_type = other RNA
gtgagcgacatgtaaatgtct

SEQ ID NO: 20873 - RNA, 21 nt, synthetic construct
  source 1..21: mol_type = other RNA
gtgagggagggaagcactggt

SEQ ID NO: 20874 - RNA, 21 nt, synthetic construct
  source 1..21: mol_type = other RNA
gtgatacaaatgaacccagcc

SEQ ID NO: 20875 - RNA, 21 nt, synthetic construct
  source 1..21: mol_type = other RNA
gtgatagcttccaaattgctg

SEQ ID NO: 20876 - RNA, 21 nt, synthetic construct
  source 1..21: mol_type = other RNA
gtgatcatgctttatgtctgt

SEQ ID NO: 20877 - RNA, 21 nt, synthetic construct
  source 1..21: mol_type = other RNA
gtgatcttgactactgcttta

SEQ ID NO: 20878 - RNA, 21 nt, synthetic construct
  source 1..21: mol_type = other RNA
gtgatgcataaggtccctgga

SEQ ID NO: 20879 - RNA, 21 nt, synthetic construct
  source 1..21: mol_type = other RNA
gtgattgttttctataactca

SEQ ID NO: 20880 - RNA, 21 nt, synthetic construct
  source 1..21: mol_type = other RNA
gtgcagcaagggtctcaaatg

SEQ ID NO: 20881 - RNA, 21 nt, synthetic construct
  source 1..21: mol_type = other RNA
gtgcctgccttggacaacagt

SEQ ID NO: 20882 - RNA, 21 nt, synthetic construct
  source 1..21: mol_type = other RNA
gtgctatgtctgaatactaga

SEQ ID NO: 20883 - RNA, 21 nt, synthetic construct
  source 1..21: mol_type = other RNA
gtgcttccctccctcaccctc

SEQ ID NO: 20884 - RNA, 21 nt, synthetic construct
  source 1..21: mol_type = other RNA
gtgcttttattcctccctagt

SEQ ID NO: 20885 - RNA, 21 nt, synthetic construct
  source 1..21: mol_type = other RNA
gtggaaaatagtgaaaaatga

SEQ ID NO: 20886 - RNA, 21 nt, synthetic construct
  source 1..21: mol_type = other RNA
gtggaaccaatctgtctggtt

SEQ ID NO: 20887 - RNA, 21 nt, synthetic construct
  source 1..21: mol_type = other RNA
gtggacagtatagctgtagcc

SEQ ID NO: 20888 - RNA, 21 nt, synthetic construct
  source 1..21: mol_type = other RNA
gtggacattgatggttttctc

SEQ ID NO: 20889 - RNA, 21 nt, synthetic construct
  source 1..21: mol_type = other RNA
gtggattacagaatacgtgga

SEQ ID NO: 20890 - RNA, 21 nt, synthetic construct
  source 1..21: mol_type = other RNA
gtggcccaagacagttcttgc

SEQ ID NO: 20891 - RNA, 21 nt, synthetic construct
  source 1..21: mol_type = other RNA
gtggctggtatgactaaagaa

SEQ ID NO: 20892 - RNA, 21 nt, synthetic construct
  source 1..21: mol_type = other RNA
gtggggtggttctttttggaa

SEQ ID NO: 20893 - RNA, 21 nt, synthetic construct
  source 1..21: mol_type = other RNA
gtgggtcatagtaattctggg

SEQ ID NO: 20894 - RNA, 21 nt, synthetic construct
  source 1..21: mol_type = other RNA
gtggtgcagcaagggtctcaa

SEQ ID NO: 20895 - RNA, 21 nt, synthetic construct
  source 1..21: mol_type = other RNA
gtggtggaaccaatctgtctg

SEQ ID NO: 20896 - RNA, 21 nt, synthetic construct
  source 1..21: mol_type = other RNA
gtggttctttttggaatgcta

SEQ ID NO: 20897 - RNA, 21 nt, synthetic construct
  source 1..21: mol_type = other RNA
gtgtagcatcaggttaaatct

SEQ ID NO: 20898 - RNA, 21 nt, synthetic construct
  source 1..21: mol_type = other RNA
gtgtagtatgtggaaaatagt

SEQ ID NO: 20899 - RNA, 21 nt, synthetic construct
  source 1..21: mol_type = other RNA
gtgtctcgcgaaaccagacag

SEQ ID NO: 20900 - RNA, 21 nt, synthetic construct
  source 1..21: mol_type = other RNA
gtgtcttgtactcctgagctc

SEQ ID NO: 20901 - RNA, 21 nt, synthetic construct
  source 1..21: mol_type = other RNA
gtgtgatacaaatgaacccag

SEQ ID NO: 20902 - RNA, 21 nt, synthetic construct
  source 1..21: mol_type = other RNA
gtgtgatagcttccaaattgc

SEQ ID NO: 20903 - RNA, 21 nt, synthetic construct
  source 1..21: mol_type = other RNA
gtgtgtagtatgtggaaaata

SEQ ID NO: 20904 - RNA, 21 nt, synthetic construct
  source 1..21: mol_type = other RNA
gtgtgtgtagtatgtggaaaa

SEQ ID NO: 20905 - RNA, 21 nt, synthetic construct
  source 1..21: mol_type = other RNA
gtgttaaaatgttggtattat

SEQ ID NO: 20906 - RNA, 21 nt, synthetic construct
  source 1..21: mol_type = other RNA
gtgttatcttttgatccatct

SEQ ID NO: 20907 - RNA, 21 nt, synthetic construct
  source 1..21: mol_type = other RNA
gtgtttccaggaagtgaaaac

SEQ ID NO: 20908 - RNA, 21 nt, synthetic construct
  source 1..21: mol_type = other RNA
gttaaaatgttggtattataa

SEQ ID NO: 20909 - RNA, 21 nt, synthetic construct
  source 1..21: mol_type = other RNA
gttaaatgaaatgtaatgggc

SEQ ID NO: 20910 - RNA, 21 nt, synthetic construct
  source 1..21: mol_type = other RNA
gttaaattgaggaaagtctat

SEQ ID NO: 20911 - RNA, 21 nt, synthetic construct
  source 1..21: mol_type = other RNA
gttaaggtaatttaaatcagc

SEQ ID NO: 20912 - RNA, 21 nt, synthetic construct
  source 1..21: mol_type = other RNA
gttacaggagctacatagtta

SEQ ID NO: 20913 - RNA, 21 nt, synthetic construct
  source 1..21: mol_type = other RNA
gttacccaaatcatagagacg

SEQ ID NO: 20914 - RNA, 21 nt, synthetic construct
  source 1..21: mol_type = other RNA
gttactaactggtaagaacag

SEQ ID NO: 20915 - RNA, 21 nt, synthetic construct
  source 1..21: mol_type = other RNA
gttagacaacttgctgtaaac

SEQ ID NO: 20916 - RNA, 21 nt, synthetic construct
  source 1..21: mol_type = other RNA
gttaggatgattgtcctaaag

SEQ ID NO: 20917 - RNA, 21 nt, synthetic construct
  source 1..21: mol_type = other RNA
gttaggcaacatctccctttt

SEQ ID NO: 20918 - RNA, 21 nt, synthetic construct
  source 1..21: mol_type = other RNA
gttagtaactgatctcagatg

SEQ ID NO: 20919 - RNA, 21 nt, synthetic construct
  source 1..21: mol_type = other RNA
gttatcttttgatccatctta

SEQ ID NO: 20920 - RNA, 21 nt, synthetic construct
  source 1..21: mol_type = other RNA
gttcacgttcttaaatgttta

SEQ ID NO: 20921 - RNA, 21 nt, synthetic construct
  source 1..21: mol_type = other RNA
gttcatttgtatcacacagac

SEQ ID NO: 20922 - RNA, 21 nt, synthetic construct
  source 1..21: mol_type = other RNA
gttccaccacaaattaaggct

SEQ ID NO: 20923 - RNA, 21 nt, synthetic construct
  source 1..21: mol_type = other RNA
gttctatgacccaaactgccc

SEQ ID NO: 20924 - RNA, 21 nt, synthetic construct
  source 1..21: mol_type = other RNA
gttctcgtgaatgtgatgcat

SEQ ID NO: 20925 - RNA, 21 nt, synthetic construct
  source 1..21: mol_type = other RNA
gttctgatatatttaactatg

SEQ ID NO: 20926 - RNA, 21 nt, synthetic construct
  source 1..21: mol_type = other RNA
gttctgtggattacagaatac

SEQ ID NO: 20927 - RNA, 21 nt, synthetic construct
  source 1..21: mol_type = other RNA
gttcttaccagttagtaactg

SEQ ID NO: 20928 - RNA, 21 nt, synthetic construct
  source 1..21: mol_type = other RNA
gttcttgcagtgtggcccagg

SEQ ID NO: 20929 - RNA, 21 nt, synthetic construct
  source 1..21: mol_type = other RNA
gttctttagtcataccagcca

SEQ ID NO: 20930 - RNA, 21 nt, synthetic construct
  source 1..21: mol_type = other RNA
gttctttttggaatgctaccc

SEQ ID NO: 20931 - RNA, 21 nt, synthetic construct
  source 1..21: mol_type = other RNA
gttgcctaacctcagatccaa

SEQ ID NO: 20932 - RNA, 21 nt, synthetic construct
  source 1..21: mol_type = other RNA
gttgctaagatgcctggtagg

SEQ ID NO: 20933 - RNA, 21 nt, synthetic construct
  source 1..21: mol_type = other RNA
gttggacttagctttcagcta

SEQ ID NO: 20934 - RNA, 21 nt, synthetic construct
  source 1..21: mol_type = other RNA
gttggctagacatcagagtat

SEQ ID NO: 20935 - RNA, 21 nt, synthetic construct
  source 1..21: mol_type = other RNA
gttgggtcgcattcaaagctg

SEQ ID NO: 20936 - RNA, 21 nt, synthetic construct
  source 1..21: mol_type = other RNA
gttggtattataattcctcag

SEQ ID NO: 20937 - RNA, 21 nt, synthetic construct
  source 1..21: mol_type = other RNA
gttgtacttgctcctctagta

SEQ ID NO: 20938 - RNA, 21 nt, synthetic construct
  source 1..21: mol_type = other RNA
gttgtcattgctgatttaaat

SEQ ID NO: 20939 - RNA, 21 nt, synthetic construct
  source 1..21: mol_type = other RNA
gttgtccaaggcaggcacatc

SEQ ID NO: 20940 - RNA, 21 nt, synthetic construct
  source 1..21: mol_type = other RNA
gttgtctaacccgcgggccgc

SEQ ID NO: 20941 - RNA, 21 nt, synthetic construct
  source 1..21: mol_type = other RNA
gttgttctatgacccaaactg

SEQ ID NO: 20942 - RNA, 21 nt, synthetic construct
  source 1..21: mol_type = other RNA
gttgttgtcattgctgattta

SEQ ID NO: 20943 - RNA, 21 nt, synthetic construct
  source 1..21: mol_type = other RNA
gtttaatggaatctcacctcc

SEQ ID NO: 20944 - RNA, 21 nt, synthetic construct
  source 1..21: mol_type = other RNA
gtttacagcaagttgtctaac

SEQ ID NO: 20945 - RNA, 21 nt, synthetic construct
  source 1..21: mol_type = other RNA
gtttacaggatgaattctgtt

SEQ ID NO: 20946 - RNA, 21 nt, synthetic construct
  source 1..21: mol_type = other RNA
gtttcacctgtcattttcatg

SEQ ID NO: 20947 - RNA, 21 nt, synthetic construct
  source 1..21: mol_type = other RNA
gtttccaggaagtgaaaactt

SEQ ID NO: 20948 - RNA, 21 nt, synthetic construct
  source 1..21: mol_type = other RNA
gtttcgcgagacaccaggcta

SEQ ID NO: 20949 - RNA, 21 nt, synthetic construct
  source 1..21: mol_type = other RNA
gtttctcaagcaaaagctaaa

SEQ ID NO: 20950 - RNA, 21 nt, synthetic construct
  source 1..21: mol_type = other RNA
gtttgacattttattaatctt

SEQ ID NO: 20951 - RNA, 21 nt, synthetic construct
  source 1..21: mol_type = other RNA
gtttgggtcatagaacaacag

SEQ ID NO: 20952 - RNA, 21 nt, synthetic construct
  source 1..21: mol_type = other RNA
gtttgtactgcgtgggtcata

SEQ ID NO: 20953 - RNA, 21 nt, synthetic construct
  source 1..21: mol_type = other RNA
gtttgttggacttagctttca

SEQ ID NO: 20954 - RNA, 21 nt, synthetic construct
  source 1..21: mol_type = other RNA
gttttataccatttgagaccc

SEQ ID NO: 20955 - RNA, 21 nt, synthetic construct
  source 1..21: mol_type = other RNA
gttttatcctgaggaattata

SEQ ID NO: 20956 - RNA, 21 nt, synthetic construct
  source 1..21: mol_type = other RNA
gttttcacttcctggaaacac

SEQ ID NO: 20957 - RNA, 21 nt, synthetic construct
  source 1..21: mol_type = other RNA
gttttctataactcaagatat

SEQ ID NO: 20958 - RNA, 21 nt, synthetic construct
  source 1..21: mol_type = other RNA
gttttctctttttactgagca

SEQ ID NO: 20959 - RNA, 21 nt, synthetic construct
  source 1..21: mol_type = other RNA
gttttcttctgactcctgagc

SEQ ID NO: 20960 - RNA, 21 nt, synthetic construct
  source 1..21: mol_type = other RNA
taaaaaagcagttttcttctg

SEQ ID NO: 20961 - RNA, 21 nt, synthetic construct
  source 1..21: mol_type = other RNA
taaaaagagaaaaccatcaat

SEQ ID NO: 20962 - RNA, 21 nt, synthetic construct
  source 1..21: mol_type = other RNA
taaaaagcatttggtgttaaa

SEQ ID NO: 20963 - RNA, 21 nt, synthetic construct
  source 1..21: mol_type = other RNA
taaaaatggtttgttggactt

SEQ ID NO: 20964 - RNA, 21 nt, synthetic construct
  source 1..21: mol_type = other RNA
taaaaattcagttctttagtc

SEQ ID NO: 20965 - RNA, 21 nt, synthetic construct
  source 1..21: mol_type = other RNA
taaaactcaggtgatcatgct

SEQ ID NO: 20966 - RNA, 21 nt, synthetic construct
  source 1..21: mol_type = other RNA
taaaagcactgctgggtaaga

SEQ ID NO: 20967 - RNA, 21 nt, synthetic construct
  source 1..21: mol_type = other RNA
taaaagcagcaagggtagcat

SEQ ID NO: 20968 - RNA, 21 nt, synthetic construct
  source 1..21: mol_type = other RNA
taaaagctgaagctctctggc

SEQ ID NO: 20969 - RNA, 21 nt, synthetic construct
  source 1..21: mol_type = other RNA
taaaagggcagtttgggtcat

SEQ ID NO: 20970 - RNA, 21 nt, synthetic construct
  source 1..21: mol_type = other RNA
taaaatgttggtattataatt

SEQ ID NO: 20971 - RNA, 21 nt, synthetic construct
  source 1..21: mol_type = other RNA
taaacagtacaagccagtaat

SEQ ID NO: 20972 - RNA, 21 nt, synthetic construct
  source 1..21: mol_type = other RNA
taaacatttaagaacgtgaac

SEQ ID NO: 20973 - RNA, 21 nt, synthetic construct
  source 1..21: mol_type = other RNA
taaaccaggggtgtccaatct

SEQ ID NO: 20974 - RNA, 21 nt, synthetic construct
  source 1..21: mol_type = other RNA
taaactgttacaggagctaca

SEQ ID NO: 20975 - RNA, 21 nt, synthetic construct
  source 1..21: mol_type = other RNA
taaagacagagacagcaattt

SEQ ID NO: 20976 - RNA, 21 nt, synthetic construct
  source 1..21: mol_type = other RNA
taaagacatttacatgtcgct

SEQ ID NO: 20977 - RNA, 21 nt, synthetic construct
  source 1..21: mol_type = other RNA
taaagatgtgcctgccttgga

SEQ ID NO: 20978 - RNA, 21 nt, synthetic construct
  source 1..21: mol_type = other RNA
taaagcagtagtcaagatcac

SEQ ID NO: 20979 - RNA, 21 nt, synthetic construct
  source 1..21: mol_type = other RNA
taaagcatgatcacctgagtt

SEQ ID NO: 20980 - RNA, 21 nt, synthetic construct
  source 1..21: mol_type = other RNA
taaaggaagatagagcatgaa

SEQ ID NO: 20981 - RNA, 21 nt, synthetic construct
  source 1..21: mol_type = other RNA
taaagttggctagacatcaga

SEQ ID NO: 20982 - RNA, 21 nt, synthetic construct
  source 1..21: mol_type = other RNA
taaatacctctcatttctgtt

SEQ ID NO: 20983 - RNA, 21 nt, synthetic construct
  source 1..21: mol_type = other RNA
taaatcagcaatgacaacaac

SEQ ID NO: 20984 - RNA, 21 nt, synthetic construct
  source 1..21: mol_type = other RNA
taaatgaaatgtaatgggcca

SEQ ID NO: 20985 - RNA, 21 nt, synthetic construct
  source 1..21: mol_type = other RNA
taaatggagtgagcgacatgt

SEQ ID NO: 20986 - RNA, 21 nt, synthetic construct
  source 1..21: mol_type = other RNA
taaattgaggaaagtctatcc

SEQ ID NO: 20987 - RNA, 21 nt, synthetic construct
  source 1..21: mol_type = other RNA
taaatttctgtcctacaagtt

SEQ ID NO: 20988 - RNA, 21 nt, synthetic construct
  source 1..21: mol_type = other RNA
taacaagatgtaagatggatc

SEQ ID NO: 20989 - RNA, 21 nt, synthetic construct
  source 1..21: mol_type = other RNA
taacactaaagacagagacag

SEQ ID NO: 20990 - RNA, 21 nt, synthetic construct
  source 1..21: mol_type = other RNA
taacagtttaatggaatctca

SEQ ID NO: 20991 - RNA, 21 nt, synthetic construct
  source 1..21: mol_type = other RNA
taacccgcgggccgcatggga

SEQ ID NO: 20992 - RNA, 21 nt, synthetic construct
  source 1..21: mol_type = other RNA
taacctcagatccaattctct

SEQ ID NO: 20993 - RNA, 21 nt, synthetic construct
  source 1..21: mol_type = other RNA
taacctgatgctacactttgg

SEQ ID NO: 20994 - RNA, 21 nt, synthetic construct
  source 1..21: mol_type = other RNA
taacgcttgctttcactgttg

SEQ ID NO: 20995 - RNA, 21 nt, synthetic construct
  source 1..21: mol_type = other RNA
taactatgtagctcctgtaac

SEQ ID NO: 20996 - RNA, 21 nt, synthetic construct
  source 1..21: mol_type = other RNA
taactattctgagctttttga

SEQ ID NO: 20997 - RNA, 21 nt, synthetic construct
  source 1..21: mol_type = other RNA
taactcaagatatgatgctta

SEQ ID NO: 20998 - RNA, 21 nt, synthetic construct
  source 1..21: mol_type = other RNA
taactgatctcagatgcctgt

SEQ ID NO: 20999 - RNA, 21 nt, synthetic construct
  source 1..21: mol_type = other RNA
taactgcaattcattccatgt

SEQ ID NO: 21000 - RNA, 21 nt, synthetic construct
  source 1..21: mol_type = other RNA
taactggtaagaacagaaatg

SEQ ID NO: 21001 - RNA, 21 nt, synthetic construct
  source 1..21: mol_type = other RNA
taagaacagaaatgagaggta

SEQ ID NO: 21002 - RNA, 21 nt, synthetic construct
  source 1..21: mol_type = other RNA
taagaacgtgaactagggagg

SEQ ID NO: 21003 - RNA, 21 nt, synthetic construct
  source 1..21: mol_type = other RNA
taagagtcaagccccagctca

SEQ ID NO: 21004 - RNA, 21 nt, synthetic construct
  source 1..21: mol_type = other RNA
taagatgcctggtagggatgc

SEQ ID NO: 21005 - RNA, 21 nt, synthetic construct
  source 1..21: mol_type = other RNA
taagatggatcaaaagataac

SEQ ID NO: 21006 - RNA, 21 nt, synthetic construct
  source 1..21: mol_type = other RNA
taagatttaacctgatgctac

SEQ ID NO: 21007 - RNA, 21 nt, synthetic construct
  source 1..21: mol_type = other RNA
taagcatcatatcttgagtta

SEQ ID NO: 21008 - RNA, 21 nt, synthetic construct
  source 1..21: mol_type = other RNA
taaggaaataaaagctgaagc

SEQ ID NO: 21009 - RNA, 21 nt, synthetic construct
  source 1..21: mol_type = other RNA
taaggcttgagctggggcttg

SEQ ID NO: 21010 - RNA, 21 nt, synthetic construct
  source 1..21: mol_type = other RNA
taaggtaatttaaatcagcaa

SEQ ID NO: 21011 - RNA, 21 nt, synthetic construct
  source 1..21: mol_type = other RNA
taaggtccctggatagacttt

SEQ ID NO: 21012 - RNA, 21 nt, synthetic construct
  source 1..21: mol_type = other RNA
taagtaaatggagtgagcgac

SEQ ID NO: 21013 - RNA, 21 nt, synthetic construct
  source 1..21: mol_type = other RNA
taagtagtgataatccgcagt

SEQ ID NO: 21014 - RNA, 21 nt, synthetic construct
  source 1..21: mol_type = other RNA
taagtccaacaaaccattttt

SEQ ID NO: 21015 - RNA, 21 nt, synthetic construct
  source 1..21: mol_type = other RNA
taagttttatcctgaggaatt

SEQ ID NO: 21016 - RNA, 21 nt, synthetic construct
  source 1..21: mol_type = other RNA
taataccaacattttaacacc

SEQ ID NO: 21017 - RNA, 21 nt, synthetic construct
  source 1..21: mol_type = other RNA
taatccacagaacaagtccgg

SEQ ID NO: 21018 - RNA, 21 nt, synthetic construct
  source 1..21: mol_type = other RNA
taatcctgcagattcaaatgt

SEQ ID NO: 21019 - RNA, 21 nt, synthetic construct
  source 1..21: mol_type = other RNA
taatcttgagcattggaaaag

SEQ ID NO: 21020 - RNA, 21 nt, synthetic construct
  source 1..21: mol_type = other RNA
taatgaattttagggaggtga

SEQ ID NO: 21021 - RNA, 21 nt, synthetic construct
  source 1..21: mol_type = other RNA
taatggaatctcacctcccta

SEQ ID NO: 21022 - RNA, 21 nt, synthetic construct
  source 1..21: mol_type = other RNA
taatggagtttcacctgtcat

SEQ ID NO: 21023 - RNA, 21 nt, synthetic construct
  source 1..21: mol_type = other RNA
taatgggccagagagcttcag

SEQ ID NO: 21024 - RNA, 21 nt, synthetic construct
  source 1..21: mol_type = other RNA
taattcctcaggataaaactt

SEQ ID NO: 21025 - RNA, 21 nt, synthetic construct
  source 1..21: mol_type = other RNA
taattctggggttgttgtcat

SEQ ID NO: 21026 - RNA, 21 nt, synthetic construct
  source 1..21: mol_type = other RNA
taatttaaatcagcaatgaca

SEQ ID NO: 21027 - RNA, 21 nt, synthetic construct
  source 1..21: mol_type = other RNA
taatttgaattgcaactgtgg

SEQ ID NO: 21028 - RNA, 21 nt, synthetic construct
  source 1..21: mol_type = other RNA
taatttgtggtggaaccaatc

SEQ ID NO: 21029 - RNA, 21 nt, synthetic construct
  source 1..21: mol_type = other RNA
tacaaactgctcaggagtcag

SEQ ID NO: 21030 - RNA, 21 nt, synthetic construct
  source 1..21: mol_type = other RNA
tacaaatgaacccagcctaaa

SEQ ID NO: 21031 - RNA, 21 nt, synthetic construct
  source 1..21: mol_type = other RNA
tacaacaaatggaaaatggga

SEQ ID NO: 21032 - RNA, 21 nt, synthetic construct
  source 1..21: mol_type = other RNA
tacaagacactattccttcaa

SEQ ID NO: 21033 - RNA, 21 nt, synthetic construct
  source 1..21: mol_type = other RNA
tacaagccagtaatggagttt

SEQ ID NO: 21034 - RNA, 21 nt, synthetic construct
  source 1..21: mol_type = other RNA
tacaagttttcacttcctgga

SEQ ID NO: 21035 - RNA, 21 nt, synthetic construct
  source 1..21: mol_type = other RNA
tacacacacaaatatgacctc

SEQ ID NO: 21036 - RNA, 21 nt, synthetic construct
  source 1..21: mol_type = other RNA
tacactttggtggtgcagcaa

SEQ ID NO: 21037 - RNA, 21 nt, synthetic construct
  source 1..21: mol_type = other RNA
tacagaatacgtggacattga

SEQ ID NO: 21038 - RNA, 21 nt, synthetic construct
  source 1..21: mol_type = other RNA
tacagagaattggatctgagg

SEQ ID NO: 21039 - RNA, 21 nt, synthetic construct
  source 1..21: mol_type = other RNA
tacagcaagttgtctaacccg

SEQ ID NO: 21040 - RNA, 21 nt, synthetic construct
  source 1..21: mol_type = other RNA
tacagctatactgtccacagt

SEQ ID NO: 21041 - RNA, 21 nt, synthetic construct
  source 1..21: mol_type = other RNA
tacaggagctacatagttaaa

SEQ ID NO: 21042 - RNA, 21 nt, synthetic construct
  source 1..21: mol_type = other RNA
tacaggatgaattctgttctc

SEQ ID NO: 21043 - RNA, 21 nt, synthetic construct
  source 1..21: mol_type = other RNA
tacatcttgttaggatgattg

SEQ ID NO: 21044 - RNA, 21 nt, synthetic construct
  source 1..21: mol_type = other RNA
tacatgtcgctcactccattt

SEQ ID NO: 21045 - RNA, 21 nt, synthetic construct
  source 1..21: mol_type = other RNA
taccaacattttaacaccaaa

SEQ ID NO: 21046 - RNA, 21 nt, synthetic construct
  source 1..21: mol_type = other RNA
taccagccacttttccaatgc

SEQ ID NO: 21047 - RNA, 21 nt, synthetic construct
  source 1..21: mol_type = other RNA
taccaggcatcttagcaactc

SEQ ID NO: 21048 - RNA, 21 nt, synthetic construct
  source 1..21: mol_type = other RNA
taccagttagtaactgatctc

SEQ ID NO: 21049 - RNA, 21 nt, synthetic construct
  source 1..21: mol_type = other RNA
taccatttgagacccttgctg

SEQ ID NO: 21050 - RNA, 21 nt, synthetic construct
  source 1..21: mol_type = other RNA
tacccaaatcatagagacgtc

SEQ ID NO: 21051 - RNA, 21 nt, synthetic construct
  source 1..21: mol_type = other RNA
tacccaagatcaagagaggga

SEQ ID NO: 21052 - RNA, 21 nt, synthetic construct
  source 1..21: mol_type = other RNA
tacccagcagtgcttttattc

SEQ ID NO: 21053 - RNA, 21 nt, synthetic construct
  source 1..21: mol_type = other RNA
tacccctttgcatccctacca

SEQ ID NO: 21054 - RNA, 21 nt, synthetic construct
  source 1..21: mol_type = other RNA
tacccttgctgcttttaatcc

SEQ ID NO: 21055 - RNA, 21 nt, synthetic construct
  source 1..21: mol_type = other RNA
tacctctcatttctgttctta

SEQ ID NO: 21056 - RNA, 21 nt, synthetic construct
  source 1..21: mol_type = other RNA
taccttaactattctgagctt

SEQ ID NO: 21057 - RNA, 21 nt, synthetic construct
  source 1..21: mol_type = other RNA
tacgtggacattgatggtttt

SEQ ID NO: 21058 - RNA, 21 nt, synthetic construct
  source 1..21: mol_type = other RNA
tactaactggtaagaacagaa

SEQ ID NO: 21059 - RNA, 21 nt, synthetic construct
  source 1..21: mol_type = other RNA
tactacacacacaaatatgac

SEQ ID NO: 21060 - RNA, 21 nt, synthetic construct
  source 1..21: mol_type = other RNA
tactagaggagcaagtacaac

SEQ ID NO: 21061 - RNA, 21 nt, synthetic construct
  source 1..21: mol_type = other RNA
tactaggagctcaggagtaca

SEQ ID NO: 21062 - RNA, 21 nt, synthetic construct
  source 1..21: mol_type = other RNA
tactatgacccacgcagtaca

SEQ ID NO: 21063 - RNA, 21 nt, synthetic construct
  source 1..21: mol_type = other RNA
tactcctgagctcctagtata

SEQ ID NO: 21064 - RNA, 21 nt, synthetic construct
  source 1..21: mol_type = other RNA
tactctgatgtctagccaact

SEQ ID NO: 21065 - RNA, 21 nt, synthetic construct
  source 1..21: mol_type = other RNA
tactgagcagtaaggaaataa

SEQ ID NO: 21066 - RNA, 21 nt, synthetic construct
  source 1..21: mol_type = other RNA
tactgcgtgggtcatagtaat

SEQ ID NO: 21067 - RNA, 21 nt, synthetic construct
  source 1..21: mol_type = other RNA
tactgctcagtaaaaagagaa

SEQ ID NO: 21068 - RNA, 21 nt, synthetic construct
  source 1..21: mol_type = other RNA
tactgctttacagagaattgg

SEQ ID NO: 21069 - RNA, 21 nt, synthetic construct
  source 1..21: mol_type = other RNA
tactggcttgtactgtttaca

SEQ ID NO: 21070 - RNA, 21 nt, synthetic construct
  source 1..21: mol_type = other RNA
tactgtccacagttgcaattc

SEQ ID NO: 21071 - RNA, 21 nt, synthetic construct
  source 1..21: mol_type = other RNA
tactgtttacagcaagttgtc

SEQ ID NO: 21072 - RNA, 21 nt, synthetic construct
  source 1..21: mol_type = other RNA
tacttaaagttggctagacat

SEQ ID NO: 21073 - RNA, 21 nt, synthetic construct
  source 1..21: mol_type = other RNA
tacttatcatttttggagcat

SEQ ID NO: 21074 - RNA, 21 nt, synthetic construct
  source 1..21: mol_type = other RNA
tacttgatcccattttccatt

SEQ ID NO: 21075 - RNA, 21 nt, synthetic construct
  source 1..21: mol_type = other RNA
tacttgctcctctagtattca

SEQ ID NO: 21076 - RNA, 21 nt, synthetic construct
  source 1..21: mol_type = other RNA
tactttgtgattgttttctat

SEQ ID NO: 21077 - RNA, 21 nt, synthetic construct
  source 1..21: mol_type = other RNA
tagaaaaatgctccaaaaatg

SEQ ID NO: 21078 - RNA, 21 nt, synthetic construct
  source 1..21: mol_type = other RNA
tagaacaacagaccatggaag

SEQ ID NO: 21079 - RNA, 21 nt, synthetic construct
  source 1..21: mol_type = other RNA
tagacaacttgctgtaaacag

SEQ ID NO: 21080 - RNA, 21 nt, synthetic construct
  source 1..21: mol_type = other RNA
tagacatcagagtatactagg

SEQ ID NO: 21081 - RNA, 21 nt, synthetic construct
  source 1..21: mol_type = other RNA
tagactttcctcaatttaaca

SEQ ID NO: 21082 - RNA, 21 nt, synthetic construct
  source 1..21: mol_type = other RNA
tagagacagacataaagcatg

SEQ ID NO: 21083 - RNA, 21 nt, synthetic construct
  source 1..21: mol_type = other RNA
tagagacgtcatatatctttg

SEQ ID NO: 21084 - RNA, 21 nt, synthetic construct
  source 1..21: mol_type = other RNA
tagagagcctggggagagagg

SEQ ID NO: 21085 - RNA, 21 nt, synthetic construct
  source 1..21: mol_type = other RNA
tagagcatgaaaatgacaggt

SEQ ID NO: 21086 - RNA, 21 nt, synthetic construct
  source 1..21: mol_type = other RNA
tagagctcctccaatcaagtg

SEQ ID NO: 21087 - RNA, 21 nt, synthetic construct
  source 1..21: mol_type = other RNA
tagaggaagaaaaagggagat

SEQ ID NO: 21088 - RNA, 21 nt, synthetic construct
  source 1..21: mol_type = other RNA
tagaggagcaagtacaacaaa

SEQ ID NO: 21089 - RNA, 21 nt, synthetic construct
  source 1..21: mol_type = other RNA
tagcaactctcactcatactt

SEQ ID NO: 21090 - RNA, 21 nt, synthetic construct
  source 1..21: mol_type = other RNA
tagcactagctttctccctct

SEQ ID NO: 21091 - RNA, 21 nt, synthetic construct
  source 1..21: mol_type = other RNA
tagcattccaaaaagaaccac

SEQ ID NO: 21092 - RNA, 21 nt, synthetic construct
  source 1..21: mol_type = other RNA
tagccaactttaagtaaatgg

SEQ ID NO: 21093 - RNA, 21 nt, synthetic construct
  source 1..21: mol_type = other RNA
tagccccggacttgttctgtg

SEQ ID NO: 21094 - RNA, 21 nt, synthetic construct
  source 1..21: mol_type = other RNA
tagcctggtgtctcgcgaaac

SEQ ID NO: 21095 - RNA, 21 nt, synthetic construct
  source 1..21: mol_type = other RNA
tagctcctgtaacagtttaat

SEQ ID NO: 21096 - RNA, 21 nt, synthetic construct
  source 1..21: mol_type = other RNA
tagctgaaagctaagtccaac

SEQ ID NO: 21097 - RNA, 21 nt, synthetic construct
  source 1..21: mol_type = other RNA
tagctgggattctgtccctga

SEQ ID NO: 21098 - RNA, 21 nt, synthetic construct
  source 1..21: mol_type = other RNA
tagctgtagccccggacttgt

SEQ ID NO: 21099 - RNA, 21 nt, synthetic construct
  source 1..21: mol_type = other RNA
tagcttccaaattgctgtctc

SEQ ID NO: 21100 - RNA, 21 nt, synthetic construct
  source 1..21: mol_type = other RNA
tagctttctccctctcttgat

SEQ ID NO: 21101 - RNA, 21 nt, synthetic construct
  source 1..21: mol_type = other RNA
tagcttttgcttgagaaacca

SEQ ID NO: 21102 - RNA, 21 nt, synthetic construct
  source 1..21: mol_type = other RNA
taggacaatcatcctaacaag

SEQ ID NO: 21103 - RNA, 21 nt, synthetic construct
  source 1..21: mol_type = other RNA
taggacagaaatttaggctgg

SEQ ID NO: 21104 - RNA, 21 nt, synthetic construct
  source 1..21: mol_type = other RNA
taggagctcaggagtacaaga

SEQ ID NO: 21105 - RNA, 21 nt, synthetic construct
  source 1..21: mol_type = other RNA
taggatgattgtcctaaagga

SEQ ID NO: 21106 - RNA, 21 nt, synthetic construct
  source 1..21: mol_type = other RNA
taggcaacatctccctttttc

SEQ ID NO: 21107 - RNA, 21 nt, synthetic construct
  source 1..21: mol_type = other RNA
taggctgggttcatttgtatc

SEQ ID NO: 21108 - RNA, 21 nt, synthetic construct
  source 1..21: mol_type = other RNA
tagggaggaataaaagcactg

SEQ ID NO: 21109 - RNA, 21 nt, synthetic construct
  source 1..21: mol_type = other RNA
tagggaggtgagattccatta

SEQ ID NO: 21110 - RNA, 21 nt, synthetic construct
  source 1..21: mol_type = other RNA
tagggatgcaaaggggtagag

SEQ ID NO: 21111 - RNA, 21 nt, synthetic construct
  source 1..21: mol_type = other RNA
taggtctgtgtgatacaaatg

SEQ ID NO: 21112 - RNA, 21 nt, synthetic construct
  source 1..21: mol_type = other RNA
tagtaactgatctcagatgcc

SEQ ID NO: 21113 - RNA, 21 nt, synthetic construct
  source 1..21: mol_type = other RNA
tagtaattctggggttgttgt

SEQ ID NO: 21114 - RNA, 21 nt, synthetic construct
  source 1..21: mol_type = other RNA
tagtatactctgatgtctagc

SEQ ID NO: 21115 - RNA, 21 nt, synthetic construct
  source 1..21: mol_type = other RNA
tagtattcagacatagcacta

SEQ ID NO: 21116 - RNA, 21 nt, synthetic construct
  source 1..21: mol_type = other RNA
tagtcaagatcacctggactg

SEQ ID NO: 21117 - RNA, 21 nt, synthetic construct
  source 1..21: mol_type = other RNA
tagtcataccagccacttttc

SEQ ID NO: 21118 - RNA, 21 nt, synthetic construct
  source 1..21: mol_type = other RNA
tagtgctatgtctgaatacta

SEQ ID NO: 21119 - RNA, 21 nt, synthetic construct
  source 1..21: mol_type = other RNA
tagtgtcttgtactcctgagc

SEQ ID NO: 21120 - RNA, 21 nt, synthetic construct
  source 1..21: mol_type = other RNA
tagtgttatcttttgatccat

SEQ ID NO: 21121 - RNA, 21 nt, synthetic construct
  source 1..21: mol_type = other RNA
tagttaaggtaatttaaatca

SEQ ID NO: 21122 - RNA, 21 nt, synthetic construct
  source 1..21: mol_type = other RNA
tagttcacgttcttaaatgtt

SEQ ID NO: 21123 - RNA, 21 nt, synthetic construct
  source 1..21: mol_type = other RNA
tataaaactcaggtgatcatg

SEQ ID NO: 21124 - RNA, 21 nt, synthetic construct
  source 1..21: mol_type = other RNA
tataactcaagatatgatgct

SEQ ID NO: 21125 - RNA, 21 nt, synthetic construct
  source 1..21: mol_type = other RNA
tataataccaacattttaaca

SEQ ID NO: 21126 - RNA, 21 nt, synthetic construct
  source 1..21: mol_type = other RNA
tataattcctcaggataaaac

SEQ ID NO: 21127 - RNA, 21 nt, synthetic construct
  source 1..21: mol_type = other RNA
tataccatttgagacccttgc

SEQ ID NO: 21128 - RNA, 21 nt, synthetic construct
  source 1..21: mol_type = other RNA
tatactaggagctcaggagta

SEQ ID NO: 21129 - RNA, 21 nt, synthetic construct
  source 1..21: mol_type = other RNA
tatactctgatgtctagccaa

SEQ ID NO: 21130 - RNA, 21 nt, synthetic construct
  source 1..21: mol_type = other RNA
tatactgtccacagttgcaat

SEQ ID NO: 21131 - RNA, 21 nt, synthetic construct
  source 1..21: mol_type = other RNA
tatagctgtagccccggactt

SEQ ID NO: 21132 - RNA, 21 nt, synthetic construct
  source 1..21: mol_type = other RNA
tatatatttagctgaaagcta

SEQ ID NO: 21133 - RNA, 21 nt, synthetic construct
  source 1..21: mol_type = other RNA
tatatcagaacttgaatgaag

SEQ ID NO: 21134 - RNA, 21 nt, synthetic construct
  source 1..21: mol_type = other RNA
tatatctttgtggggtggttc

SEQ ID NO: 21135 - RNA, 21 nt, synthetic construct
  source 1..21: mol_type = other RNA
tatatgacgtctctatgattt

SEQ ID NO: 21136 - RNA, 21 nt, synthetic construct
  source 1..21: mol_type = other RNA
tatatgtggcccaagacagtt

SEQ ID NO: 21137 - RNA, 21 nt, synthetic construct
  source 1..21: mol_type = other RNA
tatatttaactatgtagctcc

SEQ ID NO: 21138 - RNA, 21 nt, synthetic construct
  source 1..21: mol_type = other RNA
tatatttagctgaaagctaag

SEQ ID NO: 21139 - RNA, 21 nt, synthetic construct
  source 1..21: mol_type = other RNA
tatcacacagacctattcttc

SEQ ID NO: 21140 - RNA, 21 nt, synthetic construct
  source 1..21: mol_type = other RNA
tatcacacaggcatctgagat

SEQ ID NO: 21141 - RNA, 21 nt, synthetic construct
  source 1..21: mol_type = other RNA
tatcactacttatcatttttg

SEQ ID NO: 21142 - RNA, 21 nt, synthetic construct
  source 1..21: mol_type = other RNA
tatcagaacttgaatgaagaa

SEQ ID NO: 21143 - RNA, 21 nt, synthetic construct
  source 1..21: mol_type = other RNA
tatcatttttggagcattttt

SEQ ID NO: 21144 - RNA, 21 nt, synthetic construct
  source 1..21: mol_type = other RNA
tatccagggaccttatgcatc

SEQ ID NO: 21145 - RNA, 21 nt, synthetic construct
  source 1..21: mol_type = other RNA
tatcctgaggaattataatac

SEQ ID NO: 21146 - RNA, 21 nt, synthetic construct
  source 1..21: mol_type = other RNA
tatcctttttccttagctggg

SEQ ID NO: 21147 - RNA, 21 nt, synthetic construct
  source 1..21: mol_type = other RNA
tatctaatttgaattgcaact

SEQ ID NO: 21148 - RNA, 21 nt, synthetic construct
  source 1..21: mol_type = other RNA
tatcttcctttaggacaatca

SEQ ID NO: 21149 - RNA, 21 nt, synthetic construct
  source 1..21: mol_type = other RNA
tatctttgtggggtggttctt

SEQ ID NO: 21150 - RNA, 21 nt, synthetic construct
  source 1..21: mol_type = other RNA
tatcttttgatccatcttaca

SEQ ID NO: 21151 - RNA, 21 nt, synthetic construct
  source 1..21: mol_type = other RNA
tatgacccaaactgccctttt

SEQ ID NO: 21152 - RNA, 21 nt, synthetic construct
  source 1..21: mol_type = other RNA
tatgacccacgcagtacaaac

SEQ ID NO: 21153 - RNA, 21 nt, synthetic construct
  source 1..21: mol_type = other RNA
tatgacctctctcctgaagtc

SEQ ID NO: 21154 - RNA, 21 nt, synthetic construct
  source 1..21: mol_type = other RNA
tatgacgtctctatgatttgg

SEQ ID NO: 21155 - RNA, 21 nt, synthetic construct
  source 1..21: mol_type = other RNA
tatgagtgagagttgctaaga

SEQ ID NO: 21156 - RNA, 21 nt, synthetic construct
  source 1..21: mol_type = other RNA
tatgatgcttagagctcctcc

SEQ ID NO: 21157 - RNA, 21 nt, synthetic construct
  source 1..21: mol_type = other RNA
tatgatttgggtaactgcaat

SEQ ID NO: 21158 - RNA, 21 nt, synthetic construct
  source 1..21: mol_type = other RNA
tatgcatcacattcacgagaa

SEQ ID NO: 21159 - RNA, 21 nt, synthetic construct
  source 1..21: mol_type = other RNA
tatggtttgacattttattaa

SEQ ID NO: 21160 - RNA, 21 nt, synthetic construct
  source 1..21: mol_type = other RNA
tatgtagctcctgtaacagtt

SEQ ID NO: 21161 - RNA, 21 nt, synthetic construct
  source 1..21: mol_type = other RNA
tatgtctgaatactagaggag

SEQ ID NO: 21162 - RNA, 21 nt, synthetic construct
  source 1..21: mol_type = other RNA
tatgtctgtctctagaaaaat

SEQ ID NO: 21163 - RNA, 21 nt, synthetic construct
  source 1..21: mol_type = other RNA
tatgtggcccaagacagttct

SEQ ID NO: 21164 - RNA, 21 nt, synthetic construct
  source 1..21: mol_type = other RNA
tattaagatttaacctgatgc

SEQ ID NO: 21165 - RNA, 21 nt, synthetic construct
  source 1..21: mol_type = other RNA
tattaatcttgagcattggaa

SEQ ID NO: 21166 - RNA, 21 nt, synthetic construct
  source 1..21: mol_type = other RNA
tattatatatttagctgaaag

SEQ ID NO: 21167 - RNA, 21 nt, synthetic construct
  source 1..21: mol_type = other RNA
tattcagacatagcactagct

SEQ ID NO: 21168 - RNA, 21 nt, synthetic construct
  source 1..21: mol_type = other RNA
tattcctccctagttcacgtt

SEQ ID NO: 21169 - RNA, 21 nt, synthetic construct
  source 1..21: mol_type = other RNA
tattccttcaaaaagctcaga

SEQ ID NO: 21170 - RNA, 21 nt, synthetic construct
  source 1..21: mol_type = other RNA
tattctgagctttttgaagga

SEQ ID NO: 21171 - RNA, 21 nt, synthetic construct
  source 1..21: mol_type = other RNA
tattctgtaatccacagaaca

SEQ ID NO: 21172 - RNA, 21 nt, synthetic construct
  source 1..21: mol_type = other RNA
tatttaactatgtagctcctg

SEQ ID NO: 21173 - RNA, 21 nt, synthetic construct
  source 1..21: mol_type = other RNA
tatttagaggaagaaaaaggg

SEQ ID NO: 21174 - RNA, 21 nt, synthetic construct
  source 1..21: mol_type = other RNA
tatttagctgaaagctaagtc

SEQ ID NO: 21175 - RNA, 21 nt, synthetic construct
  source 1..21: mol_type = other RNA
tatttccttactgctcagtaa

SEQ ID NO: 21176 - RNA, 21 nt, synthetic construct
  source 1..21: mol_type = other RNA
tatttgtgtgtgtagtatgtg

SEQ ID NO: 21177 - RNA, 21 nt, synthetic construct
  source 1..21: mol_type = other RNA
tattttccacatactacacac

SEQ ID NO: 21178 - RNA, 21 nt, synthetic construct
  source 1..21: mol_type = other RNA
tcaaaaagctcagaatagtta

SEQ ID NO: 21179 - RNA, 21 nt, synthetic construct
  source 1..21: mol_type = other RNA
tcaaaagataacactaaagac

SEQ ID NO: 21180 - RNA, 21 nt, synthetic construct
  source 1..21: mol_type = other RNA
tcaaaccataaagacatttac

SEQ ID NO: 21181 - RNA, 21 nt, synthetic construct
  source 1..21: mol_type = other RNA
tcaaagctgtcctgggtccca

SEQ ID NO: 21182 - RNA, 21 nt, synthetic construct
  source 1..21: mol_type = other RNA
tcaaatggtataaaactcagg

SEQ ID NO: 21183 - RNA, 21 nt, synthetic construct
  source 1..21: mol_type = other RNA
tcaaatgtcatctcccctttg

SEQ ID NO: 21184 - RNA, 21 nt, synthetic construct
  source 1..21: mol_type = other RNA
tcaagagagggagaaagctag

SEQ ID NO: 21185 - RNA, 21 nt, synthetic construct
  source 1..21: mol_type = other RNA
tcaagataaacatttaagaac

SEQ ID NO: 21186 - RNA, 21 nt, synthetic construct
  source 1..21: mol_type = other RNA
tcaagatatgatgcttagagc

SEQ ID NO: 21187 - RNA, 21 nt, synthetic construct
  source 1..21: mol_type = other RNA
tcaagatcacctggactgtga

SEQ ID NO: 21188 - RNA, 21 nt, synthetic construct
  source 1..21: mol_type = other RNA
tcaagccccagctcaagcctt

SEQ ID NO: 21189 - RNA, 21 nt, synthetic construct
  source 1..21: mol_type = other RNA
tcaagccttaatttgtggtgg

SEQ ID NO: 21190 - RNA, 21 nt, synthetic construct
  source 1..21: mol_type = other RNA
tcaagtatgagtgagagttgc

SEQ ID NO: 21191 - RNA, 21 nt, synthetic construct
  source 1..21: mol_type = other RNA
tcaagtgtttccaggaagtga

SEQ ID NO: 21192 - RNA, 21 nt, synthetic construct
  source 1..21: mol_type = other RNA
tcaagttctgatatatttaac

SEQ ID NO: 21193 - RNA, 21 nt, synthetic construct
  source 1..21: mol_type = other RNA
tcaatgtccacgtattctgta

SEQ ID NO: 21194 - RNA, 21 nt, synthetic construct
  source 1..21: mol_type = other RNA
tcacaaagtaagttttatcct

SEQ ID NO: 21195 - RNA, 21 nt, synthetic construct
  source 1..21: mol_type = other RNA
tcacacagacctattcttcat

SEQ ID NO: 21196 - RNA, 21 nt, synthetic construct
  source 1..21: mol_type = other RNA
tcacacaggcatctgagatca

SEQ ID NO: 21197 - RNA, 21 nt, synthetic construct
  source 1..21: mol_type = other RNA
tcacagtccaggtgatcttga

SEQ ID NO: 21198 - RNA, 21 nt, synthetic construct
  source 1..21: mol_type = other RNA
tcacatggaatgaattgcagt

SEQ ID NO: 21199 - RNA, 21 nt, synthetic construct
  source 1..21: mol_type = other RNA
tcacattcacgagaacagaat

SEQ ID NO: 21200 - RNA, 21 nt, synthetic construct
  source 1..21: mol_type = other RNA
tcaccctctctccccaggctc

SEQ ID NO: 21201 - RNA, 21 nt, synthetic construct
  source 1..21: mol_type = other RNA
tcacctccctaaaattcatta

SEQ ID NO: 21202 - RNA, 21 nt, synthetic construct
  source 1..21: mol_type = other RNA
tcacctgagttttataccatt

SEQ ID NO: 21203 - RNA, 21 nt, synthetic construct
  source 1..21: mol_type = other RNA
tcacctggactgtgaagacgg

SEQ ID NO: 21204 - RNA, 21 nt, synthetic construct
  source 1..21: mol_type = other RNA
tcacctgtcattttcatgctc

SEQ ID NO: 21205 - RNA, 21 nt, synthetic construct
  source 1..21: mol_type = other RNA
tcacgagaacagaattcatcc

SEQ ID NO: 21206 - RNA, 21 nt, synthetic construct
  source 1..21: mol_type = other RNA
tcactacttatcatttttgga

SEQ ID NO: 21207 - RNA, 21 nt, synthetic construct
  source 1..21: mol_type = other RNA
tcactattttccacatactac

SEQ ID NO: 21208 - RNA, 21 nt, synthetic construct
  source 1..21: mol_type = other RNA
tcactcatacttgatcccatt

SEQ ID NO: 21209 - RNA, 21 nt, synthetic construct
  source 1..21: mol_type = other RNA
tcactccatttacttaaagtt

SEQ ID NO: 21210 - RNA, 21 nt, synthetic construct
  source 1..21: mol_type = other RNA
tcactgttgtccaaggcaggc

SEQ ID NO: 21211 - RNA, 21 nt, synthetic construct
  source 1..21: mol_type = other RNA
tcacttcctggaaacacttga

SEQ ID NO: 21212 - RNA, 21 nt, synthetic construct
  source 1..21: mol_type = other RNA
tcagaacttgaatgaagaata

SEQ ID NO: 21213 - RNA, 21 nt, synthetic construct
  source 1..21: mol_type = other RNA
tcagaagaaaactgctttttt

SEQ ID NO: 21214 - RNA, 21 nt, synthetic construct
  source 1..21: mol_type = other RNA
tcagaatagttaaggtaattt

SEQ ID NO: 21215 - RNA, 21 nt, synthetic construct
  source 1..21: mol_type = other RNA
tcagacatagcactagctttc

SEQ ID NO: 21216 - RNA, 21 nt, synthetic construct
  source 1..21: mol_type = other RNA
tcagagtatactaggagctca

SEQ ID NO: 21217 - RNA, 21 nt, synthetic construct
  source 1..21: mol_type = other RNA
tcagatccaattctctgtaaa

SEQ ID NO: 21218 - RNA, 21 nt, synthetic construct
  source 1..21: mol_type = other RNA
tcagatgcctgtgtgatagct

SEQ ID NO: 21219 - RNA, 21 nt, synthetic construct
  source 1..21: mol_type = other RNA
tcagcaatgacaacaacccca

SEQ ID NO: 21220 - RNA, 21 nt, synthetic construct
  source 1..21: mol_type = other RNA
tcagctgtcctttatatgtgg

SEQ ID NO: 21221 - RNA, 21 nt, synthetic construct
  source 1..21: mol_type = other RNA
tcagcttttatttccttactg

SEQ ID NO: 21222 - RNA, 21 nt, synthetic construct
  source 1..21: mol_type = other RNA
tcaggagagaggtcatatttg

SEQ ID NO: 21223 - RNA, 21 nt, synthetic construct
  source 1..21: mol_type = other RNA
tcaggagtacaagacactatt

SEQ ID NO: 21224 - RNA, 21 nt, synthetic construct
  source 1..21: mol_type = other RNA
tcaggagtcagaagaaaactg

SEQ ID NO: 21225 - RNA, 21 nt, synthetic construct
  source 1..21: mol_type = other RNA
tcaggataaaacttactttgt

SEQ ID NO: 21226 - RNA, 21 nt, synthetic construct
  source 1..21: mol_type = other RNA
tcagggacagaatcccagcta

SEQ ID NO: 21227 - RNA, 21 nt, synthetic construct
  source 1..21: mol_type = other RNA
tcaggtgatcatgctttatgt

SEQ ID NO: 21228 - RNA, 21 nt, synthetic construct
  source 1..21: mol_type = other RNA
tcagtaaaaagagaaaaccat

SEQ ID NO: 21229 - RNA, 21 nt, synthetic construct
  source 1..21: mol_type = other RNA
tcagttactaactggtaagaa

SEQ ID NO: 21230 - RNA, 21 nt, synthetic construct
  source 1..21: mol_type = other RNA
tcagttctttagtcataccag

SEQ ID NO: 21231 - RNA, 21 nt, synthetic construct
  source 1..21: mol_type = other RNA
tcataccagccacttttccaa

SEQ ID NO: 21232 - RNA, 21 nt, synthetic construct
  source 1..21: mol_type = other RNA
tcatacttgatcccattttcc

SEQ ID NO: 21233 - RNA, 21 nt, synthetic construct
  source 1..21: mol_type = other RNA
tcatagaacaacagaccatgg

SEQ ID NO: 21234 - RNA, 21 nt, synthetic construct
  source 1..21: mol_type = other RNA
tcatagagacgtcatatatct

SEQ ID NO: 21235 - RNA, 21 nt, synthetic construct
  source 1..21: mol_type = other RNA
tcatagtaattctggggttgt

SEQ ID NO: 21236 - RNA, 21 nt, synthetic construct
  source 1..21: mol_type = other RNA
tcatatatctttgtggggtgg

SEQ ID NO: 21237 - RNA, 21 nt, synthetic construct
  source 1..21: mol_type = other RNA
tcatatcttgagttatagaaa

SEQ ID NO: 21238 - RNA, 21 nt, synthetic construct
  source 1..21: mol_type = other RNA
tcatatttgtgtgtgtagtat

SEQ ID NO: 21239 - RNA, 21 nt, synthetic construct
  source 1..21: mol_type = other RNA
tcatcagctgtcctttatatg

SEQ ID NO: 21240 - RNA, 21 nt, synthetic construct
  source 1..21: mol_type = other RNA
tcatcctaacaagatgtaaga

SEQ ID NO: 21241 - RNA, 21 nt, synthetic construct
  source 1..21: mol_type = other RNA
tcatcctgtaaaccaggggtg

SEQ ID NO: 21242 - RNA, 21 nt, synthetic construct
  source 1..21: mol_type = other RNA
tcatctcccctttggtcatgc

SEQ ID NO: 21243 - RNA, 21 nt, synthetic construct
  source 1..21: mol_type = other RNA
tcatgccttccatggtctgtt

SEQ ID NO: 21244 - RNA, 21 nt, synthetic construct
  source 1..21: mol_type = other RNA
tcatgctctatcttcctttag

SEQ ID NO: 21245 - RNA, 21 nt, synthetic construct
  source 1..21: mol_type = other RNA
tcatgctttatgtctgtctct

SEQ ID NO: 21246 - RNA, 21 nt, synthetic construct
  source 1..21: mol_type = other RNA
tcattaacgcttgctttcact

SEQ ID NO: 21247 - RNA, 21 nt, synthetic construct
  source 1..21: mol_type = other RNA
tcattccatgtgacttcagga

SEQ ID NO: 21248 - RNA, 21 nt, synthetic construct
  source 1..21: mol_type = other RNA
tcatttctgttcttaccagtt

SEQ ID NO: 21249 - RNA, 21 nt, synthetic construct
  source 1..21: mol_type = other RNA
tcatttgtatcacacagacct

SEQ ID NO: 21250 - RNA, 21 nt, synthetic construct
  source 1..21: mol_type = other RNA
tcattttatcctttttcctta

SEQ ID NO: 21251 - RNA, 21 nt, synthetic construct
  source 1..21: mol_type = other RNA
tcattttcatgctctatcttc

SEQ ID NO: 21252 - RNA, 21 nt, synthetic construct
  source 1..21: mol_type = other RNA
tcatttttcactattttccac

SEQ ID NO: 21253 - RNA, 21 nt, synthetic construct
  source 1..21: mol_type = other RNA
tcatttttggagcatttttct

SEQ ID NO: 21254 - RNA, 21 nt, synthetic construct
  source 1..21: mol_type = other RNA
tccaaaaagaaccaccccaca

SEQ ID NO: 21255 - RNA, 21 nt, synthetic construct
  source 1..21: mol_type = other RNA
tccaaaaatgataagtagtga

SEQ ID NO: 21256 - RNA, 21 nt, synthetic construct
  source 1..21: mol_type = other RNA
tccaaactcattaacgcttgc

SEQ ID NO: 21257 - RNA, 21 nt, synthetic construct
  source 1..21: mol_type = other RNA
tccaaattgctgtctctgtct

SEQ ID NO: 21258 - RNA, 21 nt, synthetic construct
  source 1..21: mol_type = other RNA
tccaacaaaccatttttaaag

SEQ ID NO: 21259 - RNA, 21 nt, synthetic construct
  source 1..21: mol_type = other RNA
tccaaggcaggcacatcttta

SEQ ID NO: 21260 - RNA, 21 nt, synthetic construct
  source 1..21: mol_type = other RNA
tccaatcaagtgtttccagga

SEQ ID NO: 21261 - RNA, 21 nt, synthetic construct
  source 1..21: mol_type = other RNA
tccaatgctcaagattaataa

SEQ ID NO: 21262 - RNA, 21 nt, synthetic construct
  source 1..21: mol_type = other RNA
tccaattctctgtaaagcagt

SEQ ID NO: 21263 - RNA, 21 nt, synthetic construct
  source 1..21: mol_type = other RNA
tccacagaacaagtccggggc

SEQ ID NO: 21264 - RNA, 21 nt, synthetic construct
  source 1..21: mol_type = other RNA
tccacagttgcaattcaaatt

SEQ ID NO: 21265 - RNA, 21 nt, synthetic construct
  source 1..21: mol_type = other RNA
tccacatactacacacacaaa

SEQ ID NO: 21266 - RNA, 21 nt, synthetic construct
  source 1..21: mol_type = other RNA
tccaccacaaattaaggcttg

SEQ ID NO: 21267 - RNA, 21 nt, synthetic construct
  source 1..21: mol_type = other RNA
tccacgtattctgtaatccac

SEQ ID NO: 21268 - RNA, 21 nt, synthetic construct
  source 1..21: mol_type = other RNA
tccaggaagtgaaaacttgta

SEQ ID NO: 21269 - RNA, 21 nt, synthetic construct
  source 1..21: mol_type = other RNA
tccagggaccttatgcatcac

SEQ ID NO: 21270 - RNA, 21 nt, synthetic construct
  source 1..21: mol_type = other RNA
tccaggtgatcttgactactg

SEQ ID NO: 21271 - RNA, 21 nt, synthetic construct
  source 1..21: mol_type = other RNA
tccatcttacatcttgttagg

SEQ ID NO: 21272 - RNA, 21 nt, synthetic construct
  source 1..21: mol_type = other RNA
tccatggtctgttgttctatg

SEQ ID NO: 21273 - RNA, 21 nt, synthetic construct
  source 1..21: mol_type = other RNA
tccatgtgacttcaggagaga

SEQ ID NO: 21274 - RNA, 21 nt, synthetic construct
  source 1..21: mol_type = other RNA
tccattaaactgttacaggag

SEQ ID NO: 21275 - RNA, 21 nt, synthetic construct
  source 1..21: mol_type = other RNA
tccattactggcttgtactgt

SEQ ID NO: 21276 - RNA, 21 nt, synthetic construct
  source 1..21: mol_type = other RNA
tccatttacttaaagttggct

SEQ ID NO: 21277 - RNA, 21 nt, synthetic construct
  source 1..21: mol_type = other RNA
tccatttgttgtacttgctcc

SEQ ID NO: 21278 - RNA, 21 nt, synthetic construct
  source 1..21: mol_type = other RNA
tcccagctaaggaaaaaggat

SEQ ID NO: 21279 - RNA, 21 nt, synthetic construct
  source 1..21: mol_type = other RNA
tcccatgcggcccgcgggtta

SEQ ID NO: 21280 - RNA, 21 nt, synthetic construct
  source 1..21: mol_type = other RNA
tcccattttccatttgttgta

SEQ ID NO: 21281 - RNA, 21 nt, synthetic construct
  source 1..21: mol_type = other RNA
tccccaggctctctacccctt

SEQ ID NO: 21282 - RNA, 21 nt, synthetic construct
  source 1..21: mol_type = other RNA
tcccctttggtcatgccttcc

SEQ ID NO: 21283 - RNA, 21 nt, synthetic construct
  source 1..21: mol_type = other RNA
tccctaccaggcatcttagca

SEQ ID NO: 21284 - RNA, 21 nt, synthetic construct
  source 1..21: mol_type = other RNA
tccctagttcacgttcttaaa

SEQ ID NO: 21285 - RNA, 21 nt, synthetic construct
  source 1..21: mol_type = other RNA
tccctcaccctctctccccag

SEQ ID NO: 21286 - RNA, 21 nt, synthetic construct
  source 1..21: mol_type = other RNA
tccctccctcaccctctctcc

SEQ ID NO: 21287 - RNA, 21 nt, synthetic construct
  source 1..21: mol_type = other RNA
tccctctcttgatcttgggta

SEQ ID NO: 21288 - RNA, 21 nt, synthetic construct
  source 1..21: mol_type = other RNA
tccctgaccgtcttcacagtc

SEQ ID NO: 21289 - RNA, 21 nt, synthetic construct
  source 1..21: mol_type = other RNA
tccctggatagactttcctca

SEQ ID NO: 21290 - RNA, 21 nt, synthetic construct
  source 1..21: mol_type = other RNA
tccctgggccacactgcaaga

SEQ ID NO: 21291 - RNA, 21 nt, synthetic construct
  source 1..21: mol_type = other RNA
tccctttttcttcctctaaat

SEQ ID NO: 21292 - RNA, 21 nt, synthetic construct
  source 1..21: mol_type = other RNA
tccggggctacagctatactg

SEQ ID NO: 21293 - RNA, 21 nt, synthetic construct
  source 1..21: mol_type = other RNA
tcctaaaggaagatagagcat

SEQ ID NO: 21294 - RNA, 21 nt, synthetic construct
  source 1..21: mol_type = other RNA
tcctaacaagatgtaagatgg

SEQ ID NO: 21295 - RNA, 21 nt, synthetic construct
  source 1..21: mol_type = other RNA
tcctacaagttttcacttcct

SEQ ID NO: 21296 - RNA, 21 nt, synthetic construct
  source 1..21: mol_type = other RNA
tcctagtatactctgatgtct

SEQ ID NO: 21297 - RNA, 21 nt, synthetic construct
  source 1..21: mol_type = other RNA
tcctcaatttaacagcttttt

SEQ ID NO: 21298 - RNA, 21 nt, synthetic construct
  source 1..21: mol_type = other RNA
tcctcaggataaaacttactt

SEQ ID NO: 21299 - RNA, 21 nt, synthetic construct
  source 1..21: mol_type = other RNA
tcctccaatcaagtgtttcca

SEQ ID NO: 21300 - RNA, 21 nt, synthetic construct
  source 1..21: mol_type = other RNA
tcctccctagttcacgttctt

SEQ ID NO: 21301 - RNA, 21 nt, synthetic construct
  source 1..21: mol_type = other RNA
tcctctaaatacctctcattt

SEQ ID NO: 21302 - RNA, 21 nt, synthetic construct
  source 1..21: mol_type = other RNA
tcctctagtattcagacatag

SEQ ID NO: 21303 - RNA, 21 nt, synthetic construct
  source 1..21: mol_type = other RNA
tcctgaagtcacatggaatga

SEQ ID NO: 21304 - RNA, 21 nt, synthetic construct
  source 1..21: mol_type = other RNA
tcctgagcagtttgtactgcg

SEQ ID NO: 21305 - RNA, 21 nt, synthetic construct
  source 1..21: mol_type = other RNA
tcctgagctcctagtatactc

SEQ ID NO: 21306 - RNA, 21 nt, synthetic construct
  source 1..21: mol_type = other RNA
tcctgaggaattataatacca

SEQ ID NO: 21307 - RNA, 21 nt, synthetic construct
  source 1..21: mol_type = other RNA
tcctgcagattcaaatgtcat

SEQ ID NO: 21308 - RNA, 21 nt, synthetic construct
  source 1..21: mol_type = other RNA
tcctggaaacacttgattgga

SEQ ID NO: 21309 - RNA, 21 nt, synthetic construct
  source 1..21: mol_type = other RNA
tcctgggtcccatgcggcccg

SEQ ID NO: 21310 - RNA, 21 nt, synthetic construct
  source 1..21: mol_type = other RNA
tcctgtaaaccaggggtgtcc

SEQ ID NO: 21311 - RNA, 21 nt, synthetic construct
  source 1..21: mol_type = other RNA
tcctgtaacagtttaatggaa

SEQ ID NO: 21312 - RNA, 21 nt, synthetic construct
  source 1..21: mol_type = other RNA
tccttactgctcagtaaaaag

SEQ ID NO: 21313 - RNA, 21 nt, synthetic construct
  source 1..21: mol_type = other RNA
tccttagctgggattctgtcc

SEQ ID NO: 21314 - RNA, 21 nt, synthetic construct
  source 1..21: mol_type = other RNA
tccttcaaaaagctcagaata

SEQ ID NO: 21315 - RNA, 21 nt, synthetic construct
  source 1..21: mol_type = other RNA
tcctttaggacaatcatccta

SEQ ID NO: 21316 - RNA, 21 nt, synthetic construct
  source 1..21: mol_type = other RNA
tcctttatatgtggcccaaga

SEQ ID NO: 21317 - RNA, 21 nt, synthetic construct
  source 1..21: mol_type = other RNA
tcctttttccttagctgggat

SEQ ID NO: 21318 - RNA, 21 nt, synthetic construct
  source 1..21: mol_type = other RNA
tcgcattcaaagctgtcctgg

SEQ ID NO: 21319 - RNA, 21 nt, synthetic construct
  source 1..21: mol_type = other RNA
tcgcgaaaccagacagattgg

SEQ ID NO: 21320 - RNA, 21 nt, synthetic construct
  source 1..21: mol_type = other RNA
tcgcgagacaccaggctaccc

SEQ ID NO: 21321 - RNA, 21 nt, synthetic construct
  source 1..21: mol_type = other RNA
tcgctcactccatttacttaa

SEQ ID NO: 21322 - RNA, 21 nt, synthetic construct
  source 1..21: mol_type = other RNA
tcggcttccctgggccacact

SEQ ID NO: 21323 - RNA, 21 nt, synthetic construct
  source 1..21: mol_type = other RNA
tcgtaaactttcttaaagttt

SEQ ID NO: 21324 - RNA, 21 nt, synthetic construct
  source 1..21: mol_type = other RNA
tcgtgaatgtgatgcataagg

SEQ ID NO: 21325 - RNA, 21 nt, synthetic construct
  source 1..21: mol_type = other RNA
tctaaatacctctcatttctg

SEQ ID NO: 21326 - RNA, 21 nt, synthetic construct
  source 1..21: mol_type = other RNA
tctaacccgcgggccgcatgg

SEQ ID NO: 21327 - RNA, 21 nt, synthetic construct
  source 1..21: mol_type = other RNA
tctaagcatcatatcttgagt

SEQ ID NO: 21328 - RNA, 21 nt, synthetic construct
  source 1..21: mol_type = other RNA
tctaatttgaattgcaactgt

SEQ ID NO: 21329 - RNA, 21 nt, synthetic construct
  source 1..21: mol_type = other RNA
tctacccctttgcatccctac

SEQ ID NO: 21330 - RNA, 21 nt, synthetic construct
  source 1..21: mol_type = other RNA
tctagaaaaatgctccaaaaa

SEQ ID NO: 21331 - RNA, 21 nt, synthetic construct
  source 1..21: mol_type = other RNA
tctagagacagacataaagca

SEQ ID NO: 21332 - RNA, 21 nt, synthetic construct
  source 1..21: mol_type = other RNA
tctagccaactttaagtaaat

SEQ ID NO: 21333 - RNA, 21 nt, synthetic construct
  source 1..21: mol_type = other RNA
tctagtattcagacatagcac

SEQ ID NO: 21334 - RNA, 21 nt, synthetic construct
  source 1..21: mol_type = other RNA
tctataactcaagatatgatg

SEQ ID NO: 21335 - RNA, 21 nt, synthetic construct
  source 1..21: mol_type = other RNA
tctatccagggaccttatgca

SEQ ID NO: 21336 - RNA, 21 nt, synthetic construct
  source 1..21: mol_type = other RNA
tctatcttcctttaggacaat

SEQ ID NO: 21337 - RNA, 21 nt, synthetic construct
  source 1..21: mol_type = other RNA
tctatgacccaaactgccctt

SEQ ID NO: 21338 - RNA, 21 nt, synthetic construct
  source 1..21: mol_type = other RNA
tctatgatttgggtaactgca

SEQ ID NO: 21339 - RNA, 21 nt, synthetic construct
  source 1..21: mol_type = other RNA
tctattaagatttaacctgat

SEQ ID NO: 21340 - RNA, 21 nt, synthetic construct
  source 1..21: mol_type = other RNA
tctcaaatggtataaaactca

SEQ ID NO: 21341 - RNA, 21 nt, synthetic construct
  source 1..21: mol_type = other RNA
tctcacctccctaaaattcat

SEQ ID NO: 21342 - RNA, 21 nt, synthetic construct
  source 1..21: mol_type = other RNA
tctcactcatacttgatccca

SEQ ID NO: 21343 - RNA, 21 nt, synthetic construct
  source 1..21: mol_type = other RNA
tctcagatgcctgtgtgatag

SEQ ID NO: 21344 - RNA, 21 nt, synthetic construct
  source 1..21: mol_type = other RNA
tctcatttctgttcttaccag

SEQ ID NO: 21345 - RNA, 21 nt, synthetic construct
  source 1..21: mol_type = other RNA
tctccccaggctctctacccc

SEQ ID NO: 21346 - RNA, 21 nt, synthetic construct
  source 1..21: mol_type = other RNA
tctcccctttggtcatgcctt

SEQ ID NO: 21347 - RNA, 21 nt, synthetic construct
  source 1..21: mol_type = other RNA
tctccctctcttgatcttggg

SEQ ID NO: 21348 - RNA, 21 nt, synthetic construct
  source 1..21: mol_type = other RNA
tctccctttttcttcctctaa

SEQ ID NO: 21349 - RNA, 21 nt, synthetic construct
  source 1..21: mol_type = other RNA
tctcctgaagtcacatggaat

SEQ ID NO: 21350 - RNA, 21 nt, synthetic construct
  source 1..21: mol_type = other RNA
tctcgcgaaaccagacagatt

SEQ ID NO: 21351 - RNA, 21 nt, synthetic construct
  source 1..21: mol_type = other RNA
tctcgtgaatgtgatgcataa

SEQ ID NO: 21352 - RNA, 21 nt, synthetic construct
  source 1..21: mol_type = other RNA
tctctacccctttgcatccct

SEQ ID NO: 21353 - RNA, 21 nt, synthetic construct
  source 1..21: mol_type = other RNA
tctctagaaaaatgctccaaa

SEQ ID NO: 21354 - RNA, 21 nt, synthetic construct
  source 1..21: mol_type = other RNA
tctctatgatttgggtaactg

SEQ ID NO: 21355 - RNA, 21 nt, synthetic construct
  source 1..21: mol_type = other RNA
tctctccccaggctctctacc

SEQ ID NO: 21356 - RNA, 21 nt, synthetic construct
  source 1..21: mol_type = other RNA
tctctcctgaagtcacatgga

SEQ ID NO: 21357 - RNA, 21 nt, synthetic construct
  source 1..21: mol_type = other RNA
tctctggcccattacatttca

SEQ ID NO: 21358 - RNA, 21 nt, synthetic construct
  source 1..21: mol_type = other RNA
tctctgtaaagcagtagtcaa

SEQ ID NO: 21359 - RNA, 21 nt, synthetic construct
  source 1..21: mol_type = other RNA
tctctgtctttagtgttatct

SEQ ID NO: 21360 - RNA, 21 nt, synthetic construct
  source 1..21: mol_type = other RNA
tctcttgatcttgggtagcct

SEQ ID NO: 21361 - RNA, 21 nt, synthetic construct
  source 1..21: mol_type = other RNA
tctctttttactgagcagtaa

SEQ ID NO: 21362 - RNA, 21 nt, synthetic construct
  source 1..21: mol_type = other RNA
tctgaatactagaggagcaag

SEQ ID NO: 21363 - RNA, 21 nt, synthetic construct
  source 1..21: mol_type = other RNA
tctgactcctgagcagtttgt

SEQ ID NO: 21364 - RNA, 21 nt, synthetic construct
  source 1..21: mol_type = other RNA
tctgagatcagttactaactg

SEQ ID NO: 21365 - RNA, 21 nt, synthetic construct
  source 1..21: mol_type = other RNA
tctgagctttttgaaggaata

SEQ ID NO: 21366 - RNA, 21 nt, synthetic construct
  source 1..21: mol_type = other RNA
tctgaggttaggcaacatctc

SEQ ID NO: 21367 - RNA, 21 nt, synthetic construct
  source 1..21: mol_type = other RNA
tctgatatatttaactatgta

SEQ ID NO: 21368 - RNA, 21 nt, synthetic construct
  source 1..21: mol_type = other RNA
tctgatgtctagccaacttta

SEQ ID NO: 21369 - RNA, 21 nt, synthetic construct
  source 1..21: mol_type = other RNA
tctgcaggattaaaagcagca

SEQ ID NO: 21370 - RNA, 21 nt, synthetic construct
  source 1..21: mol_type = other RNA
tctggcccattacatttcatt

SEQ ID NO: 21371 - RNA, 21 nt, synthetic construct
  source 1..21: mol_type = other RNA
tctggggttgttgtcattgct

SEQ ID NO: 21372 - RNA, 21 nt, synthetic construct
  source 1..21: mol_type = other RNA
tctggtttcgcgagacaccag

SEQ ID NO: 21373 - RNA, 21 nt, synthetic construct
  source 1..21: mol_type = other RNA
tctgtaaagcagtagtcaaga

SEQ ID NO: 21374 - RNA, 21 nt, synthetic construct
  source 1..21: mol_type = other RNA
tctgtaatccacagaacaagt

SEQ ID NO: 21375 - RNA, 21 nt, synthetic construct
  source 1..21: mol_type = other RNA
tctgtccctgaccgtcttcac

SEQ ID NO: 21376 - RNA, 21 nt, synthetic construct
  source 1..21: mol_type = other RNA
tctgtcctacaagttttcact

SEQ ID NO: 21377 - RNA, 21 nt, synthetic construct
  source 1..21: mol_type = other RNA
tctgtctctagaaaaatgctc

SEQ ID NO: 21378 - RNA, 21 nt, synthetic construct
  source 1..21: mol_type = other RNA
tctgtctggtttcgcgagaca

SEQ ID NO: 21379 - RNA, 21 nt, synthetic construct
  source 1..21: mol_type = other RNA
tctgtctttagtgttatcttt

SEQ ID NO: 21380 - RNA, 21 nt, synthetic construct
  source 1..21: mol_type = other RNA
tctgtggattacagaatacgt

SEQ ID NO: 21381 - RNA, 21 nt, synthetic construct
  source 1..21: mol_type = other RNA
tctgtgtgatacaaatgaacc

SEQ ID NO: 21382 - RNA, 21 nt, synthetic construct
  source 1..21: mol_type = other RNA
tctgttctcgtgaatgtgatg

SEQ ID NO: 21383 - RNA, 21 nt, synthetic construct
  source 1..21: mol_type = other RNA
tctgttcttaccagttagtaa

SEQ ID NO: 21384 - RNA, 21 nt, synthetic construct
  source 1..21: mol_type = other RNA
tctgttgttctatgacccaaa

SEQ ID NO: 21385 - RNA, 21 nt, synthetic construct
  source 1..21: mol_type = other RNA
tcttacatcttgttaggatga

SEQ ID NO: 21386 - RNA, 21 nt, synthetic construct
  source 1..21: mol_type = other RNA
tcttaccagttagtaactgat

SEQ ID NO: 21387 - RNA, 21 nt, synthetic construct
  source 1..21: mol_type = other RNA
tcttacccagcagtgctttta

SEQ ID NO: 21388 - RNA, 21 nt, synthetic construct
  source 1..21: mol_type = other RNA
tcttagcaactctcactcata

SEQ ID NO: 21389 - RNA, 21 nt, synthetic construct
  source 1..21: mol_type = other RNA
tcttcacagtccaggtgatct

SEQ ID NO: 21390 - RNA, 21 nt, synthetic construct
  source 1..21: mol_type = other RNA
tcttcctctaaatacctctca

SEQ ID NO: 21391 - RNA, 21 nt, synthetic construct
  source 1..21: mol_type = other RNA
tcttcctttaggacaatcatc

SEQ ID NO: 21392 - RNA, 21 nt, synthetic construct
  source 1..21: mol_type = other RNA
tcttctgactcctgagcagtt

SEQ ID NO: 21393 - RNA, 21 nt, synthetic construct
  source 1..21: mol_type = other RNA
tcttgactactgctttacaga

SEQ ID NO: 21394 - RNA, 21 nt, synthetic construct
  source 1..21: mol_type = other RNA
tcttgagcattggaaaagtgg

SEQ ID NO: 21395 - RNA, 21 nt, synthetic construct
  source 1..21: mol_type = other RNA
tcttgagttatagaaaacaat

SEQ ID NO: 21396 - RNA, 21 nt, synthetic construct
  source 1..21: mol_type = other RNA
tcttgatcttgggtagcctgg

SEQ ID NO: 21397 - RNA, 21 nt, synthetic construct
  source 1..21: mol_type = other RNA
tcttgcagtgtggcccaggga

SEQ ID NO: 21398 - RNA, 21 nt, synthetic construct
  source 1..21: mol_type = other RNA
tcttgggccacatataaagga

SEQ ID NO: 21399 - RNA, 21 nt, synthetic construct
  source 1..21: mol_type = other RNA
tcttgggtagcctggtgtctc

SEQ ID NO: 21400 - RNA, 21 nt, synthetic construct
  source 1..21: mol_type = other RNA
tcttgtactcctgagctccta

SEQ ID NO: 21401 - RNA, 21 nt, synthetic construct
  source 1..21: mol_type = other RNA
tcttgttaggatgattgtcct

SEQ ID NO: 21402 - RNA, 21 nt, synthetic construct
  source 1..21: mol_type = other RNA
tctttaaaaatggtttgttgg

SEQ ID NO: 21403 - RNA, 21 nt, synthetic construct
  source 1..21: mol_type = other RNA
tctttagtcataccagccact

SEQ ID NO: 21404 - RNA, 21 nt, synthetic construct
  source 1..21: mol_type = other RNA
tctttagtgttatcttttgat

SEQ ID NO: 21405 - RNA, 21 nt, synthetic construct
  source 1..21: mol_type = other RNA
tctttcggcttccctgggcca

SEQ ID NO: 21406 - RNA, 21 nt, synthetic construct
  source 1..21: mol_type = other RNA
tctttgtggggtggttctttt

SEQ ID NO: 21407 - RNA, 21 nt, synthetic construct
  source 1..21: mol_type = other RNA
tcttttgatccatcttacatc

SEQ ID NO: 21408 - RNA, 21 nt, synthetic construct
  source 1..21: mol_type = other RNA
tctttttactgagcagtaagg

SEQ ID NO: 21409 - RNA, 21 nt, synthetic construct
  source 1..21: mol_type = other RNA
tctttttggaatgctaccctt

SEQ ID NO: 21410 - RNA, 21 nt, synthetic construct
  source 1..21: mol_type = other RNA
tgaaaaagctgttaaattgag

SEQ ID NO: 21411 - RNA, 21 nt, synthetic construct
  source 1..21: mol_type = other RNA
tgaaaaatgaaaaagctgtta

SEQ ID NO: 21412 - RNA, 21 nt, synthetic construct
  source 1..21: mol_type = other RNA
tgaaaacttgtaggacagaaa

SEQ ID NO: 21413 - RNA, 21 nt, synthetic construct
  source 1..21: mol_type = other RNA
tgaaaatgacaggtgaaactc

SEQ ID NO: 21414 - RNA, 21 nt, synthetic construct
  source 1..21: mol_type = other RNA
tgaaactccattactggcttg

SEQ ID NO: 21415 - RNA, 21 nt, synthetic construct
  source 1..21: mol_type = other RNA
tgaaagcaagcgttaatgagt

SEQ ID NO: 21416 - RNA, 21 nt, synthetic construct
  source 1..21: mol_type = other RNA
tgaaagctaagtccaacaaac

SEQ ID NO: 21417 - RNA, 21 nt, synthetic construct
  source 1..21: mol_type = other RNA
tgaaatccaaactcattaacg

SEQ ID NO: 21418 - RNA, 21 nt, synthetic construct
  source 1..21: mol_type = other RNA
tgaaatgtaatgggccagaga

SEQ ID NO: 21419 - RNA, 21 nt, synthetic construct
  source 1..21: mol_type = other RNA
tgaacccagcctaaatttctg

SEQ ID NO: 21420 - RNA, 21 nt, synthetic construct
  source 1..21: mol_type = other RNA
tgaactagggaggaataaaag

SEQ ID NO: 21421 - RNA, 21 nt, synthetic construct
  source 1..21: mol_type = other RNA
tgaagaataggtctgtgtgat

SEQ ID NO: 21422 - RNA, 21 nt, synthetic construct
  source 1..21: mol_type = other RNA
tgaagacggtcagggacagaa

SEQ ID NO: 21423 - RNA, 21 nt, synthetic construct
  source 1..21: mol_type = other RNA
tgaagctctctggcccattac

SEQ ID NO: 21424 - RNA, 21 nt, synthetic construct
  source 1..21: mol_type = other RNA
tgaaggaatagtgtcttgtac

SEQ ID NO: 21425 - RNA, 21 nt, synthetic construct
  source 1..21: mol_type = other RNA
tgaagtcacatggaatgaatt

SEQ ID NO: 21426 - RNA, 21 nt, synthetic construct
  source 1..21: mol_type = other RNA
tgaatactagaggagcaagta

SEQ ID NO: 21427 - RNA, 21 nt, synthetic construct
  source 1..21: mol_type = other RNA
tgaatctgcaggattaaaagc

SEQ ID NO: 21428 - RNA, 21 nt, synthetic construct
  source 1..21: mol_type = other RNA
tgaatgaagaataggtctgtg

SEQ ID NO: 21429 - RNA, 21 nt, synthetic construct
  source 1..21: mol_type = other RNA
tgaatgtgatgcataaggtcc

SEQ ID NO: 21430 - RNA, 21 nt, synthetic construct
  source 1..21: mol_type = other RNA
tgaattctgttctcgtgaatg

SEQ ID NO: 21431 - RNA, 21 nt, synthetic construct
  source 1..21: mol_type = other RNA
tgaattgcaactgtggacagt

SEQ ID NO: 21432 - RNA, 21 nt, synthetic construct
  source 1..21: mol_type = other RNA
tgaattgcagttacccaaatc

SEQ ID NO: 21433 - RNA, 21 nt, synthetic construct
  source 1..21: mol_type = other RNA
tgaattttagggaggtgagat

SEQ ID NO: 21434 - RNA, 21 nt, synthetic construct
  source 1..21: mol_type = other RNA
tgacaacaaccccagaattac

SEQ ID NO: 21435 - RNA, 21 nt, synthetic construct
  source 1..21: mol_type = other RNA
tgacaggtgaaactccattac

SEQ ID NO: 21436 - RNA, 21 nt, synthetic construct
  source 1..21: mol_type = other RNA
tgacatttgaatctgcaggat

SEQ ID NO: 21437 - RNA, 21 nt, synthetic construct
  source 1..21: mol_type = other RNA
tgacattttattaatcttgag

SEQ ID NO: 21438 - RNA, 21 nt, synthetic construct
  source 1..21: mol_type = other RNA
tgaccaaaggggagatgacat

SEQ ID NO: 21439 - RNA, 21 nt, synthetic construct
  source 1..21: mol_type = other RNA
tgacccaaactgcccttttaa

SEQ ID NO: 21440 - RNA, 21 nt, synthetic construct
  source 1..21: mol_type = other RNA
tgacccacgcagtacaaactg

SEQ ID NO: 21441 - RNA, 21 nt, synthetic construct
  source 1..21: mol_type = other RNA
tgaccgtcttcacagtccagg

SEQ ID NO: 21442 - RNA, 21 nt, synthetic construct
  source 1..21: mol_type = other RNA
tgacctctctcctgaagtcac

SEQ ID NO: 21443 - RNA, 21 nt, synthetic construct
  source 1..21: mol_type = other RNA
tgacgtctctatgatttgggt

SEQ ID NO: 21444 - RNA, 21 nt, synthetic construct
  source 1..21: mol_type = other RNA
tgactactgctttacagagaa

SEQ ID NO: 21445 - RNA, 21 nt, synthetic construct
  source 1..21: mol_type = other RNA
tgactcctgagcagtttgtac

SEQ ID NO: 21446 - RNA, 21 nt, synthetic construct
  source 1..21: mol_type = other RNA
tgactcttacccagcagtgct

SEQ ID NO: 21447 - RNA, 21 nt, synthetic construct
  source 1..21: mol_type = other RNA
tgacttcaggagagaggtcat

SEQ ID NO: 21448 - RNA, 21 nt, synthetic construct
  source 1..21: mol_type = other RNA
tgagaaaccagtgcttccctc

SEQ ID NO: 21449 - RNA, 21 nt, synthetic construct
  source 1..21: mol_type = other RNA
tgagacccttgctgcaccacc

SEQ ID NO: 21450 - RNA, 21 nt, synthetic construct
  source 1..21: mol_type = other RNA
tgagaggtatttagaggaaga

SEQ ID NO: 21451 - RNA, 21 nt, synthetic construct
  source 1..21: mol_type = other RNA
tgagagttgctaagatgcctg

SEQ ID NO: 21452 - RNA, 21 nt, synthetic construct
  source 1..21: mol_type = other RNA
tgagatcagttactaactggt

SEQ ID NO: 21453 - RNA, 21 nt, synthetic construct
  source 1..21: mol_type = other RNA
tgagattccattaaactgtta

SEQ ID NO: 21454 - RNA, 21 nt, synthetic construct
  source 1..21: mol_type = other RNA
tgagcagtaaggaaataaaag

SEQ ID NO: 21455 - RNA, 21 nt, synthetic construct
  source 1..21: mol_type = other RNA
tgagcagtttgtactgcgtgg

SEQ ID NO: 21456 - RNA, 21 nt, synthetic construct
  source 1..21: mol_type = other RNA
tgagcattggaaaagtggctg

SEQ ID NO: 21457 - RNA, 21 nt, synthetic construct
  source 1..21: mol_type = other RNA
tgagcgacatgtaaatgtctt

SEQ ID NO: 21458 - RNA, 21 nt, synthetic construct
  source 1..21: mol_type = other RNA
tgagctcctagtatactctga

SEQ ID NO: 21459 - RNA, 21 nt, synthetic construct
  source 1..21: mol_type = other RNA
tgagctggggcttgactctta

SEQ ID NO: 21460 - RNA, 21 nt, synthetic construct
  source 1..21: mol_type = other RNA
tgagctttttgaaggaatagt

SEQ ID NO: 21461 - RNA, 21 nt, synthetic construct
  source 1..21: mol_type = other RNA
tgaggaaagtctatccaggga

SEQ ID NO: 21462 - RNA, 21 nt, synthetic construct
  source 1..21: mol_type = other RNA
tgagggagggaagcactggtt

SEQ ID NO: 21463 - RNA, 21 nt, synthetic construct
  source 1..21: mol_type = other RNA
tgaggttaggcaacatctccc

SEQ ID NO: 21464 - RNA, 21 nt, synthetic construct
  source 1..21: mol_type = other RNA
tgagtgagagttgctaagatg

SEQ ID NO: 21465 - RNA, 21 nt, synthetic construct
  source 1..21: mol_type = other RNA
tgagttatagaaaacaatcac

SEQ ID NO: 21466 - RNA, 21 nt, synthetic construct
  source 1..21: mol_type = other RNA
tgagttttataccatttgaga

SEQ ID NO: 21467 - RNA, 21 nt, synthetic construct
  source 1..21: mol_type = other RNA
tgataagtagtgataatccgc

SEQ ID NO: 21468 - RNA, 21 nt, synthetic construct
  source 1..21: mol_type = other RNA
tgatacaaatgaacccagcct

SEQ ID NO: 21469 - RNA, 21 nt, synthetic construct
  source 1..21: mol_type = other RNA
tgatagcttccaaattgctgt

SEQ ID NO: 21470 - RNA, 21 nt, synthetic construct
  source 1..21: mol_type = other RNA
tgatatatttaactatgtagc

SEQ ID NO: 21471 - RNA, 21 nt, synthetic construct
  source 1..21: mol_type = other RNA
tgatcacctgagttttatacc

SEQ ID NO: 21472 - RNA, 21 nt, synthetic construct
  source 1..21: mol_type = other RNA
tgatcatgctttatgtctgtc

SEQ ID NO: 21473 - RNA, 21 nt, synthetic construct
  source 1..21: mol_type = other RNA
tgatccatcttacatcttgtt

SEQ ID NO: 21474 - RNA, 21 nt, synthetic construct
  source 1..21: mol_type = other RNA
tgatcccattttccatttgtt

SEQ ID NO: 21475 - RNA, 21 nt, synthetic construct
  source 1..21: mol_type = other RNA
tgatctcagatgcctgtgtga

SEQ ID NO: 21476 - RNA, 21 nt, synthetic construct
  source 1..21: mol_type = other RNA
tgatcttgactactgctttac

SEQ ID NO: 21477 - RNA, 21 nt, synthetic construct
  source 1..21: mol_type = other RNA
tgatcttgggtagcctggtgt

SEQ ID NO: 21478 - RNA, 21 nt, synthetic construct
  source 1..21: mol_type = other RNA
tgatgcataaggtccctggat

SEQ ID NO: 21479 - RNA, 21 nt, synthetic construct
  source 1..21: mol_type = other RNA
tgatgctacactttggtggtg

SEQ ID NO: 21480 - RNA, 21 nt, synthetic construct
  source 1..21: mol_type = other RNA
tgatgcttagagctcctccaa

SEQ ID NO: 21481 - RNA, 21 nt, synthetic construct
  source 1..21: mol_type = other RNA
tgatggttttctctttttact

SEQ ID NO: 21482 - RNA, 21 nt, synthetic construct
  source 1..21: mol_type = other RNA
tgatgtctagccaactttaag

SEQ ID NO: 21483 - RNA, 21 nt, synthetic construct
  source 1..21: mol_type = other RNA
tgattggaggagctctaagca

SEQ ID NO: 21484 - RNA, 21 nt, synthetic construct
  source 1..21: mol_type = other RNA
tgattgtcctaaaggaagata

SEQ ID NO: 21485 - RNA, 21 nt, synthetic construct
  source 1..21: mol_type = other RNA
tgatttaaattaccttaacta

SEQ ID NO: 21486 - RNA, 21 nt, synthetic construct
  source 1..21: mol_type = other RNA
tgatttgggtaactgcaattc

SEQ ID NO: 21487 - RNA, 21 nt, synthetic construct
  source 1..21: mol_type = other RNA
tgattttcattttatcctttt

SEQ ID NO: 21488 - RNA, 21 nt, synthetic construct
  source 1..21: mol_type = other RNA
tgcaaaggggtagagagcctg

SEQ ID NO: 21489 - RNA, 21 nt, synthetic construct
  source 1..21: mol_type = other RNA
tgcaacgagactgcggattat

SEQ ID NO: 21490 - RNA, 21 nt, synthetic construct
  source 1..21: mol_type = other RNA
tgcaactgtggacagtatagc

SEQ ID NO: 21491 - RNA, 21 nt, synthetic construct
  source 1..21: mol_type = other RNA
tgcaagaactgtcttgggcca

SEQ ID NO: 21492 - RNA, 21 nt, synthetic construct
  source 1..21: mol_type = other RNA
tgcaattcattccatgtgact

SEQ ID NO: 21493 - RNA, 21 nt, synthetic construct
  source 1..21: mol_type = other RNA
tgcaccaccaaagtgtagcat

SEQ ID NO: 21494 - RNA, 21 nt, synthetic construct
  source 1..21: mol_type = other RNA
tgcagattcaaatgtcatctc

SEQ ID NO: 21495 - RNA, 21 nt, synthetic construct
  source 1..21: mol_type = other RNA
tgcagcaagggtctcaaatgg

SEQ ID NO: 21496 - RNA, 21 nt, synthetic construct
  source 1..21: mol_type = other RNA
tgcaggattaaaagcagcaag

SEQ ID NO: 21497 - RNA, 21 nt, synthetic construct
  source 1..21: mol_type = other RNA
tgcagtgtggcccagggaagc

SEQ ID NO: 21498 - RNA, 21 nt, synthetic construct
  source 1..21: mol_type = other RNA
tgcagttacccaaatcataga

SEQ ID NO: 21499 - RNA, 21 nt, synthetic construct
  source 1..21: mol_type = other RNA
tgcataaggtccctggataga

SEQ ID NO: 21500 - RNA, 21 nt, synthetic construct
  source 1..21: mol_type = other RNA
tgcataatgaattttagggag

SEQ ID NO: 21501 - RNA, 21 nt, synthetic construct
  source 1..21: mol_type = other RNA
tgcatcacattcacgagaaca

SEQ ID NO: 21502 - RNA, 21 nt, synthetic construct
  source 1..21: mol_type = other RNA
tgcatccctaccaggcatctt

SEQ ID NO: 21503 - RNA, 21 nt, synthetic construct
  source 1..21: mol_type = other RNA
tgcccttttaaaaaagcagtt

SEQ ID NO: 21504 - RNA, 21 nt, synthetic construct
  source 1..21: mol_type = other RNA
tgcctaacctcagatccaatt

SEQ ID NO: 21505 - RNA, 21 nt, synthetic construct
  source 1..21: mol_type = other RNA
tgcctgccttggacaacagtg

SEQ ID NO: 21506 - RNA, 21 nt, synthetic construct
  source 1..21: mol_type = other RNA
tgcctggtagggatgcaaagg

SEQ ID NO: 21507 - RNA, 21 nt, synthetic construct
  source 1..21: mol_type = other RNA
tgcctgtgtgatagcttccaa

SEQ ID NO: 21508 - RNA, 21 nt, synthetic construct
  source 1..21: mol_type = other RNA
tgccttccatggtctgttgtt

SEQ ID NO: 21509 - RNA, 21 nt, synthetic construct
  source 1..21: mol_type = other RNA
tgccttggacaacagtgaaag

SEQ ID NO: 21510 - RNA, 21 nt, synthetic construct
  source 1..21: mol_type = other RNA
tgcggattatcactacttatc

SEQ ID NO: 21511 - RNA, 21 nt, synthetic construct
  source 1..21: mol_type = other RNA
tgcggcccgcgggttagacaa

SEQ ID NO: 21512 - RNA, 21 nt, synthetic construct
  source 1..21: mol_type = other RNA
tgcgtgggtcatagtaattct

SEQ ID NO: 21513 - RNA, 21 nt, synthetic construct
  source 1..21: mol_type = other RNA
tgctaagatgcctggtaggga

SEQ ID NO: 21514 - RNA, 21 nt, synthetic construct
  source 1..21: mol_type = other RNA
tgctacactttggtggtgcag

SEQ ID NO: 21515 - RNA, 21 nt, synthetic construct
  source 1..21: mol_type = other RNA
tgctacccttgctgcttttaa

SEQ ID NO: 21516 - RNA, 21 nt, synthetic construct
  source 1..21: mol_type = other RNA
tgctatgtctgaatactagag

SEQ ID NO: 21517 - RNA, 21 nt, synthetic construct
  source 1..21: mol_type = other RNA
tgctcaagattaataaaatgt

SEQ ID NO: 21518 - RNA, 21 nt, synthetic construct
  source 1..21: mol_type = other RNA
tgctcaggagtcagaagaaaa

SEQ ID NO: 21519 - RNA, 21 nt, synthetic construct
  source 1..21: mol_type = other RNA
tgctcagtaaaaagagaaaac

SEQ ID NO: 21520 - RNA, 21 nt, synthetic construct
  source 1..21: mol_type = other RNA
tgctcatcagctgtcctttat

SEQ ID NO: 21521 - RNA, 21 nt, synthetic construct
  source 1..21: mol_type = other RNA
tgctccaaaaatgataagtag

SEQ ID NO: 21522 - RNA, 21 nt, synthetic construct
  source 1..21: mol_type = other RNA
tgctcctctagtattcagaca

SEQ ID NO: 21523 - RNA, 21 nt, synthetic construct
  source 1..21: mol_type = other RNA
tgctctatcttcctttaggac

SEQ ID NO: 21524 - RNA, 21 nt, synthetic construct
  source 1..21: mol_type = other RNA
tgctgatttaaattaccttaa

SEQ ID NO: 21525 - RNA, 21 nt, synthetic construct
  source 1..21: mol_type = other RNA
tgctgcaccaccaaagtgtag

SEQ ID NO: 21526 - RNA, 21 nt, synthetic construct
  source 1..21: mol_type = other RNA
tgctgcttttaatcctgcaga

SEQ ID NO: 21527 - RNA, 21 nt, synthetic construct
  source 1..21: mol_type = other RNA
tgctgggtaagagtcaagccc

SEQ ID NO: 21528 - RNA, 21 nt, synthetic construct
  source 1..21: mol_type = other RNA
tgctgtaaacagtacaagcca

SEQ ID NO: 21529 - RNA, 21 nt, synthetic construct
  source 1..21: mol_type = other RNA
tgctgtctctgtctttagtgt

SEQ ID NO: 21530 - RNA, 21 nt, synthetic construct
  source 1..21: mol_type = other RNA
tgcttagagctcctccaatca

SEQ ID NO: 21531 - RNA, 21 nt, synthetic construct
  source 1..21: mol_type = other RNA
tgcttccctccctcaccctct

SEQ ID NO: 21532 - RNA, 21 nt, synthetic construct
  source 1..21: mol_type = other RNA
tgcttgagaaaccagtgcttc

SEQ ID NO: 21533 - RNA, 21 nt, synthetic construct
  source 1..21: mol_type = other RNA
tgctttacagagaattggatc

SEQ ID NO: 21534 - RNA, 21 nt, synthetic construct
  source 1..21: mol_type = other RNA
tgctttatgtctgtctctaga

SEQ ID NO: 21535 - RNA, 21 nt, synthetic construct
  source 1..21: mol_type = other RNA
tgctttcactgttgtccaagg

SEQ ID NO: 21536 - RNA, 21 nt, synthetic construct
  source 1..21: mol_type = other RNA
tgcttttaatcctgcagattc

SEQ ID NO: 21537 - RNA, 21 nt, synthetic construct
  source 1..21: mol_type = other RNA
tgcttttattcctccctagtt

SEQ ID NO: 21538 - RNA, 21 nt, synthetic construct
  source 1..21: mol_type = other RNA
tgcttttttaaaagggcagtt

SEQ ID NO: 21539 - RNA, 21 nt, synthetic construct
  source 1..21: mol_type = other RNA
tggaaaagtggctggtatgac

SEQ ID NO: 21540 - RNA, 21 nt, synthetic construct
  source 1..21: mol_type = other RNA
tggaaaatagtgaaaaatgaa

SEQ ID NO: 21541 - RNA, 21 nt, synthetic construct
  source 1..21: mol_type = other RNA
tggaaaatgggatcaagtatg

SEQ ID NO: 21542 - RNA, 21 nt, synthetic construct
  source 1..21: mol_type = other RNA
tggaaacacttgattggagga

SEQ ID NO: 21543 - RNA, 21 nt, synthetic construct
  source 1..21: mol_type = other RNA
tggaaccaatctgtctggttt

SEQ ID NO: 21544 - RNA, 21 nt, synthetic construct
  source 1..21: mol_type = other RNA
tggaagctatcacacaggcat

SEQ ID NO: 21545 - RNA, 21 nt, synthetic construct
  source 1..21: mol_type = other RNA
tggaaggcatgaccaaagggg

SEQ ID NO: 21546 - RNA, 21 nt, synthetic construct
  source 1..21: mol_type = other RNA
tggaatctcacctccctaaaa

SEQ ID NO: 21547 - RNA, 21 nt, synthetic construct
  source 1..21: mol_type = other RNA
tggaatgaattgcagttaccc

SEQ ID NO: 21548 - RNA, 21 nt, synthetic construct
  source 1..21: mol_type = other RNA
tggaatgctacccttgctgct

SEQ ID NO: 21549 - RNA, 21 nt, synthetic construct
  source 1..21: mol_type = other RNA
tggacaacagtgaaagcaagc

SEQ ID NO: 21550 - RNA, 21 nt, synthetic construct
  source 1..21: mol_type = other RNA
tggacacccctggtttacagg

SEQ ID NO: 21551 - RNA, 21 nt, synthetic construct
  source 1..21: mol_type = other RNA
tggacagtatagctgtagccc

SEQ ID NO: 21552 - RNA, 21 nt, synthetic construct
  source 1..21: mol_type = other RNA
tggacattgatggttttctct

SEQ ID NO: 21553 - RNA, 21 nt, synthetic construct
  source 1..21: mol_type = other RNA
tggactgtgaagacggtcagg

SEQ ID NO: 21554 - RNA, 21 nt, synthetic construct
  source 1..21: mol_type = other RNA
tggacttagctttcagctaaa

SEQ ID NO: 21555 - RNA, 21 nt, synthetic construct
  source 1..21: mol_type = other RNA
tggagcatttttctagagaca

SEQ ID NO: 21556 - RNA, 21 nt, synthetic construct
  source 1..21: mol_type = other RNA
tggaggagctctaagcatcat

SEQ ID NO: 21557 - RNA, 21 nt, synthetic construct
  source 1..21: mol_type = other RNA
tggagtgagcgacatgtaaat

SEQ ID NO: 21558 - RNA, 21 nt, synthetic construct
  source 1..21: mol_type = other RNA
tggagtttcacctgtcatttt

SEQ ID NO: 21559 - RNA, 21 nt, synthetic construct
  source 1..21: mol_type = other RNA
tggatagactttcctcaattt

SEQ ID NO: 21560 - RNA, 21 nt, synthetic construct
  source 1..21: mol_type = other RNA
tggatcaaaagataacactaa

SEQ ID NO: 21561 - RNA, 21 nt, synthetic construct
  source 1..21: mol_type = other RNA
tggatctgaggttaggcaaca

SEQ ID NO: 21562 - RNA, 21 nt, synthetic construct
  source 1..21: mol_type = other RNA
tggattacagaatacgtggac

SEQ ID NO: 21563 - RNA, 21 nt, synthetic construct
  source 1..21: mol_type = other RNA
tggcccaagacagttcttgca

SEQ ID NO: 21564 - RNA, 21 nt, synthetic construct
  source 1..21: mol_type = other RNA
tggcccattacatttcattta

SEQ ID NO: 21565 - RNA, 21 nt, synthetic construct
  source 1..21: mol_type = other RNA
tggctagacatcagagtatac

SEQ ID NO: 21566 - RNA, 21 nt, synthetic construct
  source 1..21: mol_type = other RNA
tggctggtatgactaaagaac

SEQ ID NO: 21567 - RNA, 21 nt, synthetic construct
  source 1..21: mol_type = other RNA
tggcttgtactgtttacagca

SEQ ID NO: 21568 - RNA, 21 nt, synthetic construct
  source 1..21: mol_type = other RNA
tgggacccaggacagctttga

SEQ ID NO: 21569 - RNA, 21 nt, synthetic construct
  source 1..21: mol_type = other RNA
tgggatcaagtatgagtgaga

SEQ ID NO: 21570 - RNA, 21 nt, synthetic construct
  source 1..21: mol_type = other RNA
tgggattctgtccctgaccgt

SEQ ID NO: 21571 - RNA, 21 nt, synthetic construct
  source 1..21: mol_type = other RNA
tgggccacactgcaagaactg

SEQ ID NO: 21572 - RNA, 21 nt, synthetic construct
  source 1..21: mol_type = other RNA
tgggccacatataaaggacag

SEQ ID NO: 21573 - RNA, 21 nt, synthetic construct
  source 1..21: mol_type = other RNA
tgggccagagagcttcagctt

SEQ ID NO: 21574 - RNA, 21 nt, synthetic construct
  source 1..21: mol_type = other RNA
tggggagagagggtgagggag

SEQ ID NO: 21575 - RNA, 21 nt, synthetic construct
  source 1..21: mol_type = other RNA
tggggcttgactcttacccag

SEQ ID NO: 21576 - RNA, 21 nt, synthetic construct
  source 1..21: mol_type = other RNA
tggggtggttctttttggaat

SEQ ID NO: 21577 - RNA, 21 nt, synthetic construct
  source 1..21: mol_type = other RNA
tggggttgttgtcattgctga

SEQ ID NO: 21578 - RNA, 21 nt, synthetic construct
  source 1..21: mol_type = other RNA
tgggtaactgcaattcattcc

SEQ ID NO: 21579 - RNA, 21 nt, synthetic construct
  source 1..21: mol_type = other RNA
tgggtaagagtcaagccccag

SEQ ID NO: 21580 - RNA, 21 nt, synthetic construct
  source 1..21: mol_type = other RNA
tgggtagcctggtgtctcgcg

SEQ ID NO: 21581 - RNA, 21 nt, synthetic construct
  source 1..21: mol_type = other RNA
tgggtcatagaacaacagacc

SEQ ID NO: 21582 - RNA, 21 nt, synthetic construct
  source 1..21: mol_type = other RNA
tgggtcatagtaattctgggg

SEQ ID NO: 21583 - RNA, 21 nt, synthetic construct
  source 1..21: mol_type = other RNA
tgggtcccatgcggcccgcgg

SEQ ID NO: 21584 - RNA, 21 nt, synthetic construct
  source 1..21: mol_type = other RNA
tgggtcgcattcaaagctgtc

SEQ ID NO: 21585 - RNA, 21 nt, synthetic construct
  source 1..21: mol_type = other RNA
tgggttcatttgtatcacaca

SEQ ID NO: 21586 - RNA, 21 nt, synthetic construct
  source 1..21: mol_type = other RNA
tggtaagaacagaaatgagag

SEQ ID NO: 21587 - RNA, 21 nt, synthetic construct
  source 1..21: mol_type = other RNA
tggtagggatgcaaaggggta

SEQ ID NO: 21588 - RNA, 21 nt, synthetic construct
  source 1..21: mol_type = other RNA
tggtataaaactcaggtgatc

SEQ ID NO: 21589 - RNA, 21 nt, synthetic construct
  source 1..21: mol_type = other RNA
tggtattataattcctcagga

SEQ ID NO: 21590 - RNA, 21 nt, synthetic construct
  source 1..21: mol_type = other RNA
tggtcatgccttccatggtct

SEQ ID NO: 21591 - RNA, 21 nt, synthetic construct
  source 1..21: mol_type = other RNA
tggtctgttgttctatgaccc

SEQ ID NO: 21592 - RNA, 21 nt, synthetic construct
  source 1..21: mol_type = other RNA
tggtgcagcaagggtctcaaa

SEQ ID NO: 21593 - RNA, 21 nt, synthetic construct
  source 1..21: mol_type = other RNA
tggtggaaccaatctgtctgg

SEQ ID NO: 21594 - RNA, 21 nt, synthetic construct
  source 1..21: mol_type = other RNA
tggtggtgcagcaagggtctc

SEQ ID NO: 21595 - RNA, 21 nt, synthetic construct
  source 1..21: mol_type = other RNA
tggtgtctcgcgaaaccagac

SEQ ID NO: 21596 - RNA, 21 nt, synthetic construct
  source 1..21: mol_type = other RNA
tggtgttaaaatgttggtatt

SEQ ID NO: 21597 - RNA, 21 nt, synthetic construct
  source 1..21: mol_type = other RNA
tggttccaccacaaattaagg

SEQ ID NO: 21598 - RNA, 21 nt, synthetic construct
  source 1..21: mol_type = other RNA
tggttctttttggaatgctac

SEQ ID NO: 21599 - RNA, 21 nt, synthetic construct
  source 1..21: mol_type = other RNA
tggtttacaggatgaattctg

SEQ ID NO: 21600 - RNA, 21 nt, synthetic construct
  source 1..21: mol_type = other RNA
tggtttcgcgagacaccaggc

SEQ ID NO: 21601 - RNA, 21 nt, synthetic construct
  source 1..21: mol_type = other RNA
tggtttctcaagcaaaagcta

SEQ ID NO: 21602 - RNA, 21 nt, synthetic construct
  source 1..21: mol_type = other RNA
tggtttgacattttattaatc

SEQ ID NO: 21603 - RNA, 21 nt, synthetic construct
  source 1..21: mol_type = other RNA
tggtttgttggacttagcttt

SEQ ID NO: 21604 - RNA, 21 nt, synthetic construct
  source 1..21: mol_type = other RNA
tggttttctctttttactgag

SEQ ID NO: 21605 - RNA, 21 nt, synthetic construct
  source 1..21: mol_type = other RNA
tgtaaacagtacaagccagta

SEQ ID NO: 21606 - RNA, 21 nt, synthetic construct
  source 1..21: mol_type = other RNA
tgtaaaccaggggtgtccaat

SEQ ID NO: 21607 - RNA, 21 nt, synthetic construct
  source 1..21: mol_type = other RNA
tgtaaagcagtagtcaagatc

SEQ ID NO: 21608 - RNA, 21 nt, synthetic construct
  source 1..21: mol_type = other RNA
tgtaacagtttaatggaatct

SEQ ID NO: 21609 - RNA, 21 nt, synthetic construct
  source 1..21: mol_type = other RNA
tgtaagatggatcaaaagata

SEQ ID NO: 21610 - RNA, 21 nt, synthetic construct
  source 1..21: mol_type = other RNA
tgtaatccacagaacaagtcc

SEQ ID NO: 21611 - RNA, 21 nt, synthetic construct
  source 1..21: mol_type = other RNA
tgtaatgggccagagagcttc

SEQ ID NO: 21612 - RNA, 21 nt, synthetic construct
  source 1..21: mol_type = other RNA
tgtactcctgagctcctagta

SEQ ID NO: 21613 - RNA, 21 nt, synthetic construct
  source 1..21: mol_type = other RNA
tgtactgcgtgggtcatagta

SEQ ID NO: 21614 - RNA, 21 nt, synthetic construct
  source 1..21: mol_type = other RNA
tgtactgtttacagcaagttg

SEQ ID NO: 21615 - RNA, 21 nt, synthetic construct
  source 1..21: mol_type = other RNA
tgtacttgctcctctagtatt

SEQ ID NO: 21616 - RNA, 21 nt, synthetic construct
  source 1..21: mol_type = other RNA
tgtagcatcaggttaaatctt

SEQ ID NO: 21617 - RNA, 21 nt, synthetic construct
  source 1..21: mol_type = other RNA
tgtagccccggacttgttctg

SEQ ID NO: 21618 - RNA, 21 nt, synthetic construct
  source 1..21: mol_type = other RNA
tgtagctcctgtaacagttta

SEQ ID NO: 21619 - RNA, 21 nt, synthetic construct
  source 1..21: mol_type = other RNA
tgtaggacagaaatttaggct

SEQ ID NO: 21620 - RNA, 21 nt, synthetic construct
  source 1..21: mol_type = other RNA
tgtagtatgtggaaaatagtg

SEQ ID NO: 21621 - RNA, 21 nt, synthetic construct
  source 1..21: mol_type = other RNA
tgtatcacacagacctattct

SEQ ID NO: 21622 - RNA, 21 nt, synthetic construct
  source 1..21: mol_type = other RNA
tgtattagcaatataaaaagc

SEQ ID NO: 21623 - RNA, 21 nt, synthetic construct
  source 1..21: mol_type = other RNA
tgtcaaaccataaagacattt

SEQ ID NO: 21624 - RNA, 21 nt, synthetic construct
  source 1..21: mol_type = other RNA
tgtcatctcccctttggtcat

SEQ ID NO: 21625 - RNA, 21 nt, synthetic construct
  source 1..21: mol_type = other RNA
tgtcattgctgatttaaatta

SEQ ID NO: 21626 - RNA, 21 nt, synthetic construct
  source 1..21: mol_type = other RNA
tgtcattttcatgctctatct

SEQ ID NO: 21627 - RNA, 21 nt, synthetic construct
  source 1..21: mol_type = other RNA
tgtccaaggcaggcacatctt

SEQ ID NO: 21628 - RNA, 21 nt, synthetic construct
  source 1..21: mol_type = other RNA
tgtccacagttgcaattcaaa

SEQ ID NO: 21629 - RNA, 21 nt, synthetic construct
  source 1..21: mol_type = other RNA
tgtccacgtattctgtaatcc

SEQ ID NO: 21630 - RNA, 21 nt, synthetic construct
  source 1..21: mol_type = other RNA
tgtccctgaccgtcttcacag

SEQ ID NO: 21631 - RNA, 21 nt, synthetic construct
  source 1..21: mol_type = other RNA
tgtcctaaaggaagatagagc

SEQ ID NO: 21632 - RNA, 21 nt, synthetic construct
  source 1..21: mol_type = other RNA
tgtcctacaagttttcacttc

SEQ ID NO: 21633 - RNA, 21 nt, synthetic construct
  source 1..21: mol_type = other RNA
tgtcctgggtcccatgcggcc

SEQ ID NO: 21634 - RNA, 21 nt, synthetic construct
  source 1..21: mol_type = other RNA
tgtcctttatatgtggcccaa

SEQ ID NO: 21635 - RNA, 21 nt, synthetic construct
  source 1..21: mol_type = other RNA
tgtcgctcactccatttactt

SEQ ID NO: 21636 - RNA, 21 nt, synthetic construct
  source 1..21: mol_type = other RNA
tgtctaacccgcgggccgcat

SEQ ID NO: 21637 - RNA, 21 nt, synthetic construct
  source 1..21: mol_type = other RNA
tgtctagccaactttaagtaa

SEQ ID NO: 21638 - RNA, 21 nt, synthetic construct
  source 1..21: mol_type = other RNA
tgtctcgcgaaaccagacaga

SEQ ID NO: 21639 - RNA, 21 nt, synthetic construct
  source 1..21: mol_type = other RNA
tgtctctagaaaaatgctcca

SEQ ID NO: 21640 - RNA, 21 nt, synthetic construct
  source 1..21: mol_type = other RNA
tgtctctgtctttagtgttat

SEQ ID NO: 21641 - RNA, 21 nt, synthetic construct
  source 1..21: mol_type = other RNA
tgtctgaatactagaggagca

SEQ ID NO: 21642 - RNA, 21 nt, synthetic construct
  source 1..21: mol_type = other RNA
tgtctggtttcgcgagacacc

SEQ ID NO: 21643 - RNA, 21 nt, synthetic construct
  source 1..21: mol_type = other RNA
tgtctgtctctagaaaaatgc

SEQ ID NO: 21644 - RNA, 21 nt, synthetic construct
  source 1..21: mol_type = other RNA
tgtcttgggccacatataaag

SEQ ID NO: 21645 - RNA, 21 nt, synthetic construct
  source 1..21: mol_type = other RNA
tgtcttgtactcctgagctcc

SEQ ID NO: 21646 - RNA, 21 nt, synthetic construct
  source 1..21: mol_type = other RNA
tgtctttagtgttatcttttg

SEQ ID NO: 21647 - RNA, 21 nt, synthetic construct
  source 1..21: mol_type = other RNA
tgtgaagacggtcagggacag

SEQ ID NO: 21648 - RNA, 21 nt, synthetic construct
  source 1..21: mol_type = other RNA
tgtgacttcaggagagaggtc

SEQ ID NO: 21649 - RNA, 21 nt, synthetic construct
  source 1..21: mol_type = other RNA
tgtgatacaaatgaacccagc

SEQ ID NO: 21650 - RNA, 21 nt, synthetic construct
  source 1..21: mol_type = other RNA
tgtgatagcttccaaattgct

SEQ ID NO: 21651 - RNA, 21 nt, synthetic construct
  source 1..21: mol_type = other RNA
tgtgatgcataaggtccctgg

SEQ ID NO: 21652 - RNA, 21 nt, synthetic construct
  source 1..21: mol_type = other RNA
tgtgattgttttctataactc

SEQ ID NO: 21653 - RNA, 21 nt, synthetic construct
  source 1..21: mol_type = other RNA
tgtgcctgccttggacaacag

SEQ ID NO: 21654 - RNA, 21 nt, synthetic construct
  source 1..21: mol_type = other RNA
tgtggaaaatagtgaaaaatg

SEQ ID NO: 21655 - RNA, 21 nt, synthetic construct
  source 1..21: mol_type = other RNA
tgtggacagtatagctgtagc

SEQ ID NO: 21656 - RNA, 21 nt, synthetic construct
  source 1..21: mol_type = other RNA
tgtggattacagaatacgtgg

SEQ ID NO: 21657 - RNA, 21 nt, synthetic construct
  source 1..21: mol_type = other RNA
tgtggcccaagacagttcttg

SEQ ID NO: 21658 - RNA, 21 nt, synthetic construct
  source 1..21: mol_type = other RNA
tgtggggtggttctttttgga

SEQ ID NO: 21659 - RNA, 21 nt, synthetic construct
  source 1..21: mol_type = other RNA
tgtggtggaaccaatctgtct

SEQ ID NO: 21660 - RNA, 21 nt, synthetic construct
  source 1..21: mol_type = other RNA
tgtgtagtatgtggaaaatag

SEQ ID NO: 21661 - RNA, 21 nt, synthetic construct
  source 1..21: mol_type = other RNA
tgtgtgatacaaatgaaccca

SEQ ID NO: 21662 - RNA, 21 nt, synthetic construct
  source 1..21: mol_type = other RNA
tgtgtgatagcttccaaattg

SEQ ID NO: 21663 - RNA, 21 nt, synthetic construct
  source 1..21: mol_type = other RNA
tgtgtgtagtatgtggaaaat

SEQ ID NO: 21664 - RNA, 21 nt, synthetic construct
  source 1..21: mol_type = other RNA
tgtgtgtgtagtatgtggaaa

SEQ ID NO: 21665 - RNA, 21 nt, synthetic construct
  source 1..21: mol_type = other RNA
tgttaaattgaggaaagtcta

SEQ ID NO: 21666 - RNA, 21 nt, synthetic construct
  source 1..21: mol_type = other RNA
tgttacaggagctacatagtt

SEQ ID NO: 21667 - RNA, 21 nt, synthetic construct
  source 1..21: mol_type = other RNA
tgttaggatgattgtcctaaa

SEQ ID NO: 21668 - RNA, 21 nt, synthetic construct
  source 1..21: mol_type = other RNA
tgttatcttttgatccatctt

SEQ ID NO: 21669 - RNA, 21 nt, synthetic construct
  source 1..21: mol_type = other RNA
tgttctatgacccaaactgcc

SEQ ID NO: 21670 - RNA, 21 nt, synthetic construct
  source 1..21: mol_type = other RNA
tgttctcgtgaatgtgatgca

SEQ ID NO: 21671 - RNA, 21 nt, synthetic construct
  source 1..21: mol_type = other RNA
tgttctgtggattacagaata

SEQ ID NO: 21672 - RNA, 21 nt, synthetic construct
  source 1..21: mol_type = other RNA
tgttcttaccagttagtaact

SEQ ID NO: 21673 - RNA, 21 nt, synthetic construct
  source 1..21: mol_type = other RNA
tgttgcctaacctcagatcca

SEQ ID NO: 21674 - RNA, 21 nt, synthetic construct
  source 1..21: mol_type = other RNA
tgttggacttagctttcagct

SEQ ID NO: 21675 - RNA, 21 nt, synthetic construct
  source 1..21: mol_type = other RNA
tgttggtattataattcctca

SEQ ID NO: 21676 - RNA, 21 nt, synthetic construct
  source 1..21: mol_type = other RNA
tgttgtacttgctcctctagt

SEQ ID NO: 21677 - RNA, 21 nt, synthetic construct
  source 1..21: mol_type = other RNA
tgttgtcattgctgatttaaa

SEQ ID NO: 21678 - RNA, 21 nt, synthetic construct
  source 1..21: mol_type = other RNA
tgttgtccaaggcaggcacat

SEQ ID NO: 21679 - RNA, 21 nt, synthetic construct
  source 1..21: mol_type = other RNA
tgttgttctatgacccaaact

SEQ ID NO: 21680 - RNA, 21 nt, synthetic construct
  source 1..21: mol_type = other RNA
tgtttacagcaagttgtctaa

SEQ ID NO: 21681 - RNA, 21 nt, synthetic construct
  source 1..21: mol_type = other RNA
tgtttccaggaagtgaaaact

SEQ ID NO: 21682 - RNA, 21 nt, synthetic construct
  source 1..21: mol_type = other RNA
tgttttctataactcaagata

SEQ ID NO: 21683 - RNA, 21 nt, synthetic construct
  source 1..21: mol_type = other RNA
ttaaaaaagcagttttcttct

SEQ ID NO: 21684 - RNA, 21 nt, synthetic construct
  source 1..21: mol_type = other RNA
ttaaaaatggtttgttggact

SEQ ID NO: 21685 - RNA, 21 nt, synthetic construct
  source 1..21: mol_type = other RNA
ttaaaagcagcaagggtagca

SEQ ID NO: 21686 - RNA, 21 nt, synthetic construct
  source 1..21: mol_type = other RNA
ttaaaagggcagtttgggtca

SEQ ID NO: 21687 - RNA, 21 nt, synthetic construct
  source 1..21: mol_type = other RNA
ttaaaatgttggtattataat

SEQ ID NO: 21688 - RNA, 21 nt, synthetic construct
  source 1..21: mol_type = other RNA
ttaaactgttacaggagctac

SEQ ID NO: 21689 - RNA, 21 nt, synthetic construct
  source 1..21: mol_type = other RNA
ttaaagatgtgcctgccttgg

SEQ ID NO: 21690 - RNA, 21 nt, synthetic construct
  source 1..21: mol_type = other RNA
ttaaagttggctagacatcag

SEQ ID NO: 21691 - RNA, 21 nt, synthetic construct
  source 1..21: mol_type = other RNA
ttaaatcagcaatgacaacaa

SEQ ID NO: 21692 - RNA, 21 nt, synthetic construct
  source 1..21: mol_type = other RNA
ttaaatgaaatgtaatgggcc

SEQ ID NO: 21693 - RNA, 21 nt, synthetic construct
  source 1..21: mol_type = other RNA
ttaaattgaggaaagtctatc

SEQ ID NO: 21694 - RNA, 21 nt, synthetic construct
  source 1..21: mol_type = other RNA
ttaacctgatgctacactttg

SEQ ID NO: 21695 - RNA, 21 nt, synthetic construct
  source 1..21: mol_type = other RNA
ttaacgcttgctttcactgtt

SEQ ID NO: 21696 - RNA, 21 nt, synthetic construct
  source 1..21: mol_type = other RNA
ttaactatgtagctcctgtaa

SEQ ID NO: 21697 - RNA, 21 nt, synthetic construct
  source 1..21: mol_type = other RNA
ttaactattctgagctttttg

SEQ ID NO: 21698 - RNA, 21 nt, synthetic construct
  source 1..21: mol_type = other RNA
ttaagaacgtgaactagggag

SEQ ID NO: 21699 - RNA, 21 nt, synthetic construct
  source 1..21: mol_type = other RNA
ttaagatttaacctgatgcta

SEQ ID NO: 21700 - RNA, 21 nt, synthetic construct
  source 1..21: mol_type = other RNA
ttaaggcttgagctggggctt

SEQ ID NO: 21701 - RNA, 21 nt, synthetic construct
  source 1..21: mol_type = other RNA
ttaaggtaatttaaatcagca

SEQ ID NO: 21702 - RNA, 21 nt, synthetic construct
  source 1..21: mol_type = other RNA
ttaagtaaatggagtgagcga

SEQ ID NO: 21703 - RNA, 21 nt, synthetic construct
  source 1..21: mol_type = other RNA
ttaatcctgcagattcaaatg

SEQ ID NO: 21704 - RNA, 21 nt, synthetic construct
  source 1..21: mol_type = other RNA
ttaatcttgagcattggaaaa

SEQ ID NO: 21705 - RNA, 21 nt, synthetic construct
  source 1..21: mol_type = other RNA
ttaatggaatctcacctccct

SEQ ID NO: 21706 - RNA, 21 nt, synthetic construct
  source 1..21: mol_type = other RNA
ttaatttgtggtggaaccaat

SEQ ID NO: 21707 - RNA, 21 nt, synthetic construct
  source 1..21: mol_type = other RNA
ttacagaatacgtggacattg

SEQ ID NO: 21708 - RNA, 21 nt, synthetic construct
  source 1..21: mol_type = other RNA
ttacagagaattggatctgag

SEQ ID NO: 21709 - RNA, 21 nt, synthetic construct
  source 1..21: mol_type = other RNA
ttacagcaagttgtctaaccc

SEQ ID NO: 21710 - RNA, 21 nt, synthetic construct
  source 1..21: mol_type = other RNA
ttacaggagctacatagttaa

SEQ ID NO: 21711 - RNA, 21 nt, synthetic construct
  source 1..21: mol_type = other RNA
ttacaggatgaattctgttct

SEQ ID NO: 21712 - RNA, 21 nt, synthetic construct
  source 1..21: mol_type = other RNA
ttacatcttgttaggatgatt

SEQ ID NO: 21713 - RNA, 21 nt, synthetic construct
  source 1..21: mol_type = other RNA
ttacatgtcgctcactccatt

SEQ ID NO: 21714 - RNA, 21 nt, synthetic construct
  source 1..21: mol_type = other RNA
ttaccagttagtaactgatct

SEQ ID NO: 21715 - RNA, 21 nt, synthetic construct
  source 1..21: mol_type = other RNA
ttacccaaatcatagagacgt

SEQ ID NO: 21716 - RNA, 21 nt, synthetic construct
  source 1..21: mol_type = other RNA
ttacccagcagtgcttttatt

SEQ ID NO: 21717 - RNA, 21 nt, synthetic construct
  source 1..21: mol_type = other RNA
ttaccttaactattctgagct

SEQ ID NO: 21718 - RNA, 21 nt, synthetic construct
  source 1..21: mol_type = other RNA
ttactaactggtaagaacaga

SEQ ID NO: 21719 - RNA, 21 nt, synthetic construct
  source 1..21: mol_type = other RNA
ttactatgacccacgcagtac

SEQ ID NO: 21720 - RNA, 21 nt, synthetic construct
  source 1..21: mol_type = other RNA
ttactgagcagtaaggaaata

SEQ ID NO: 21721 - RNA, 21 nt, synthetic construct
  source 1..21: mol_type = other RNA
ttactgctcagtaaaaagaga

SEQ ID NO: 21722 - RNA, 21 nt, synthetic construct
  source 1..21: mol_type = other RNA
ttactggcttgtactgtttac

SEQ ID NO: 21723 - RNA, 21 nt, synthetic construct
  source 1..21: mol_type = other RNA
ttacttaaagttggctagaca

SEQ ID NO: 21724 - RNA, 21 nt, synthetic construct
  source 1..21: mol_type = other RNA
ttagacaacttgctgtaaaca

SEQ ID NO: 21725 - RNA, 21 nt, synthetic construct
  source 1..21: mol_type = other RNA
ttagagctcctccaatcaagt

SEQ ID NO: 21726 - RNA, 21 nt, synthetic construct
  source 1..21: mol_type = other RNA
ttagaggaagaaaaagggaga

SEQ ID NO: 21727 - RNA, 21 nt, synthetic construct
  source 1..21: mol_type = other RNA
ttagcaactctcactcatact

SEQ ID NO: 21728 - RNA, 21 nt, synthetic construct
  source 1..21: mol_type = other RNA
ttagctgaaagctaagtccaa

SEQ ID NO: 21729 - RNA, 21 nt, synthetic construct
  source 1..21: mol_type = other RNA
ttagctgggattctgtccctg

SEQ ID NO: 21730 - RNA, 21 nt, synthetic construct
  source 1..21: mol_type = other RNA
ttagcttttgcttgagaaacc

SEQ ID NO: 21731 - RNA, 21 nt, synthetic construct
  source 1..21: mol_type = other RNA
ttaggacaatcatcctaacaa

SEQ ID NO: 21732 - RNA, 21 nt, synthetic construct
  source 1..21: mol_type = other RNA
ttaggatgattgtcctaaagg

SEQ ID NO: 21733 - RNA, 21 nt, synthetic construct
  source 1..21: mol_type = other RNA
ttaggcaacatctcccttttt

SEQ ID NO: 21734 - RNA, 21 nt, synthetic construct
  source 1..21: mol_type = other RNA
ttaggctgggttcatttgtat

SEQ ID NO: 21735 - RNA, 21 nt, synthetic construct
  source 1..21: mol_type = other RNA
ttagggaggtgagattccatt

SEQ ID NO: 21736 - RNA, 21 nt, synthetic construct
  source 1..21: mol_type = other RNA
ttagtaactgatctcagatgc

SEQ ID NO: 21737 - RNA, 21 nt, synthetic construct
  source 1..21: mol_type = other RNA
ttagtcataccagccactttt

SEQ ID NO: 21738 - RNA, 21 nt, synthetic construct
  source 1..21: mol_type = other RNA
ttagtgttatcttttgatcca

SEQ ID NO: 21739 - RNA, 21 nt, synthetic construct
  source 1..21: mol_type = other RNA
ttataccatttgagacccttg

SEQ ID NO: 21740 - RNA, 21 nt, synthetic construct
  source 1..21: mol_type = other RNA
ttatatatttagctgaaagct

SEQ ID NO: 21741 - RNA, 21 nt, synthetic construct
  source 1..21: mol_type = other RNA
ttatatgtggcccaagacagt

SEQ ID NO: 21742 - RNA, 21 nt, synthetic construct
  source 1..21: mol_type = other RNA
ttatcactacttatcattttt

SEQ ID NO: 21743 - RNA, 21 nt, synthetic construct
  source 1..21: mol_type = other RNA
ttatcatttttggagcatttt

SEQ ID NO: 21744 - RNA, 21 nt, synthetic construct
  source 1..21: mol_type = other RNA
ttatcctgaggaattataata

SEQ ID NO: 21745 - RNA, 21 nt, synthetic construct
  source 1..21: mol_type = other RNA
ttatcctttttccttagctgg

SEQ ID NO: 21746 - RNA, 21 nt, synthetic construct
  source 1..21: mol_type = other RNA
ttatctaatttgaattgcaac

SEQ ID NO: 21747 - RNA, 21 nt, synthetic construct
  source 1..21: mol_type = other RNA
ttatcttttgatccatcttac

SEQ ID NO: 21748 - RNA, 21 nt, synthetic construct
  source 1..21: mol_type = other RNA
ttatgcatcacattcacgaga

SEQ ID NO: 21749 - RNA, 21 nt, synthetic construct
  source 1..21: mol_type = other RNA
ttatgtctgtctctagaaaaa

SEQ ID NO: 21750 - RNA, 21 nt, synthetic construct
  source 1..21: mol_type = other RNA
ttattaatcttgagcattgga

SEQ ID NO: 21751 - RNA, 21 nt, synthetic construct
  source 1..21: mol_type = other RNA
ttattcctccctagttcacgt

SEQ ID NO: 21752 - RNA, 21 nt, synthetic construct
  source 1..21: mol_type = other RNA
ttatttccttactgctcagta

SEQ ID NO: 21753 - RNA, 21 nt, synthetic construct
  source 1..21: mol_type = other RNA
ttcaaaaagctcagaatagtt

SEQ ID NO: 21754 - RNA, 21 nt, synthetic construct
  source 1..21: mol_type = other RNA
ttcaaagctgtcctgggtccc

SEQ ID NO: 21755 - RNA, 21 nt, synthetic construct
  source 1..21: mol_type = other RNA
ttcaaatgtcatctccccttt

SEQ ID NO: 21756 - RNA, 21 nt, synthetic construct
  source 1..21: mol_type = other RNA
ttcacagtccaggtgatcttg

SEQ ID NO: 21757 - RNA, 21 nt, synthetic construct
  source 1..21: mol_type = other RNA
ttcacctgtcattttcatgct

SEQ ID NO: 21758 - RNA, 21 nt, synthetic construct
  source 1..21: mol_type = other RNA
ttcacgagaacagaattcatc

SEQ ID NO: 21759 - RNA, 21 nt, synthetic construct
  source 1..21: mol_type = other RNA
ttcactattttccacatacta

SEQ ID NO: 21760 - RNA, 21 nt, synthetic construct
  source 1..21: mol_type = other RNA
ttcactgttgtccaaggcagg

SEQ ID NO: 21761 - RNA, 21 nt, synthetic construct
  source 1..21: mol_type = other RNA
ttcacttcctggaaacacttg

SEQ ID NO: 21762 - RNA, 21 nt, synthetic construct
  source 1..21: mol_type = other RNA
ttcagacatagcactagcttt

SEQ ID NO: 21763 - RNA, 21 nt, synthetic construct
  source 1..21: mol_type = other RNA
ttcagcttttatttccttact

SEQ ID NO: 21764 - RNA, 21 nt, synthetic construct
  source 1..21: mol_type = other RNA
ttcaggagagaggtcatattt

SEQ ID NO: 21765 - RNA, 21 nt, synthetic construct
  source 1..21: mol_type = other RNA
ttcagttctttagtcatacca

SEQ ID NO: 21766 - RNA, 21 nt, synthetic construct
  source 1..21: mol_type = other RNA
ttcatcctgtaaaccaggggt

SEQ ID NO: 21767 - RNA, 21 nt, synthetic construct
  source 1..21: mol_type = other RNA
ttcatgctctatcttccttta

SEQ ID NO: 21768 - RNA, 21 nt, synthetic construct
  source 1..21: mol_type = other RNA
ttcattccatgtgacttcagg

SEQ ID NO: 21769 - RNA, 21 nt, synthetic construct
  source 1..21: mol_type = other RNA
ttcatttgtatcacacagacc

SEQ ID NO: 21770 - RNA, 21 nt, synthetic construct
  source 1..21: mol_type = other RNA
ttcattttatcctttttcctt

SEQ ID NO: 21771 - RNA, 21 nt, synthetic construct
  source 1..21: mol_type = other RNA
ttcatttttcactattttcca

SEQ ID NO: 21772 - RNA, 21 nt, synthetic construct
  source 1..21: mol_type = other RNA
ttccaaaaagaaccaccccac

SEQ ID NO: 21773 - RNA, 21 nt, synthetic construct
  source 1..21: mol_type = other RNA
ttccaaattgctgtctctgtc

SEQ ID NO: 21774 - RNA, 21 nt, synthetic construct
  source 1..21: mol_type = other RNA
ttccaatgctcaagattaata

SEQ ID NO: 21775 - RNA, 21 nt, synthetic construct
  source 1..21: mol_type = other RNA
ttccacatactacacacacaa

SEQ ID NO: 21776 - RNA, 21 nt, synthetic construct
  source 1..21: mol_type = other RNA
ttccaccacaaattaaggctt

SEQ ID NO: 21777 - RNA, 21 nt, synthetic construct
  source 1..21: mol_type = other RNA
ttccaggaagtgaaaacttgt

SEQ ID NO: 21778 - RNA, 21 nt, synthetic construct
  source 1..21: mol_type = other RNA
ttccatggtctgttgttctat

SEQ ID NO: 21779 - RNA, 21 nt, synthetic construct
  source 1..21: mol_type = other RNA
ttccatgtgacttcaggagag

SEQ ID NO: 21780 - RNA, 21 nt, synthetic construct
  source 1..21: mol_type = other RNA
ttccattaaactgttacagga

SEQ ID NO: 21781 - RNA, 21 nt, synthetic construct
  source 1..21: mol_type = other RNA
ttccatttgttgtacttgctc

SEQ ID NO: 21782 - RNA, 21 nt, synthetic construct
  source 1..21: mol_type = other RNA
ttccctccctcaccctctctc

SEQ ID NO: 21783 - RNA, 21 nt, synthetic construct
  source 1..21: mol_type = other RNA
ttccctgggccacactgcaag

SEQ ID NO: 21784 - RNA, 21 nt, synthetic construct
  source 1..21: mol_type = other RNA
ttcctcaggataaaacttact

SEQ ID NO: 21785 - RNA, 21 nt, synthetic construct
  source 1..21: mol_type = other RNA
ttcctccctagttcacgttct

SEQ ID NO: 21786 - RNA, 21 nt, synthetic construct
  source 1..21: mol_type = other RNA
ttcctctaaatacctctcatt

SEQ ID NO: 21787 - RNA, 21 nt, synthetic construct
  source 1..21: mol_type = other RNA
ttcctggaaacacttgattgg

SEQ ID NO: 21788 - RNA, 21 nt, synthetic construct
  source 1..21: mol_type = other RNA
ttccttactgctcagtaaaaa

SEQ ID NO: 21789 - RNA, 21 nt, synthetic construct
  source 1..21: mol_type = other RNA
ttccttagctgggattctgtc

SEQ ID NO: 21790 - RNA, 21 nt, synthetic construct
  source 1..21: mol_type = other RNA
ttccttcaaaaagctcagaat

SEQ ID NO: 21791 - RNA, 21 nt, synthetic construct
  source 1..21: mol_type = other RNA
ttcctttaggacaatcatcct

SEQ ID NO: 21792 - RNA, 21 nt, synthetic construct
  source 1..21: mol_type = other RNA
ttcgcgagacaccaggctacc

SEQ ID NO: 21793 - RNA, 21 nt, synthetic construct
  source 1..21: mol_type = other RNA
ttcggcttccctgggccacac

SEQ ID NO: 21794 - RNA, 21 nt, synthetic construct
  source 1..21: mol_type = other RNA
ttcgtaaactttcttaaagtt

SEQ ID NO: 21795 - RNA, 21 nt, synthetic construct
  source 1..21: mol_type = other RNA
ttctagagacagacataaagc

SEQ ID NO: 21796 - RNA, 21 nt, synthetic construct
  source 1..21: mol_type = other RNA
ttctataactcaagatatgat

SEQ ID NO: 21797 - RNA, 21 nt, synthetic construct
  source 1..21: mol_type = other RNA
ttctatgacccaaactgccct

SEQ ID NO: 21798 - RNA, 21 nt, synthetic construct
  source 1..21: mol_type = other RNA
ttctattaagatttaacctga

SEQ ID NO: 21799 - RNA, 21 nt, synthetic construct
  source 1..21: mol_type = other RNA
ttctccctctcttgatcttgg

SEQ ID NO: 21800 - RNA, 21 nt, synthetic construct
  source 1..21: mol_type = other RNA
ttctcgtgaatgtgatgcata

SEQ ID NO: 21801 - RNA, 21 nt, synthetic construct
  source 1..21: mol_type = other RNA
ttctctgtaaagcagtagtca

SEQ ID NO: 21802 - RNA, 21 nt, synthetic construct
  source 1..21: mol_type = other RNA
ttctctttttactgagcagta

SEQ ID NO: 21803 - RNA, 21 nt, synthetic construct
  source 1..21: mol_type = other RNA
ttctgactcctgagcagtttg

SEQ ID NO: 21804 - RNA, 21 nt, synthetic construct
  source 1..21: mol_type = other RNA
ttctgagctttttgaaggaat

SEQ ID NO: 21805 - RNA, 21 nt, synthetic construct
  source 1..21: mol_type = other RNA
ttctgatatatttaactatgt

SEQ ID NO: 21806 - RNA, 21 nt, synthetic construct
  source 1..21: mol_type = other RNA
ttctggggttgttgtcattgc

SEQ ID NO: 21807 - RNA, 21 nt, synthetic construct
  source 1..21: mol_type = other RNA
ttctgtaatccacagaacaag

SEQ ID NO: 21808 - RNA, 21 nt, synthetic construct
  source 1..21: mol_type = other RNA
ttctgtccctgaccgtcttca

SEQ ID NO: 21809 - RNA, 21 nt, synthetic construct
  source 1..21: mol_type = other RNA
ttctgtcctacaagttttcac

SEQ ID NO: 21810 - RNA, 21 nt, synthetic construct
  source 1..21: mol_type = other RNA
ttctgtggattacagaatacg

SEQ ID NO: 21811 - RNA, 21 nt, synthetic construct
  source 1..21: mol_type = other RNA
ttctgttctcgtgaatgtgat

SEQ ID NO: 21812 - RNA, 21 nt, synthetic construct
  source 1..21: mol_type = other RNA
ttctgttcttaccagttagta

SEQ ID NO: 21813 - RNA, 21 nt, synthetic construct
  source 1..21: mol_type = other RNA
ttcttaccagttagtaactga

SEQ ID NO: 21814 - RNA, 21 nt, synthetic construct
  source 1..21: mol_type = other RNA
ttcttcctctaaatacctctc

SEQ ID NO: 21815 - RNA, 21 nt, synthetic construct
  source 1..21: mol_type = other RNA
ttcttctgactcctgagcagt

SEQ ID NO: 21816 - RNA, 21 nt, synthetic construct
  source 1..21: mol_type = other RNA
ttcttgcagtgtggcccaggg

SEQ ID NO: 21817 - RNA, 21 nt, synthetic construct
  source 1..21: mol_type = other RNA
ttctttagtcataccagccac

SEQ ID NO: 21818 - RNA, 21 nt, synthetic construct
  source 1..21: mol_type = other RNA
ttctttttggaatgctaccct

SEQ ID NO: 21819 - RNA, 21 nt, synthetic construct
  source 1..21: mol_type = other RNA
ttgaaatccaaactcattaac

SEQ ID NO: 21820 - RNA, 21 nt, synthetic construct
  source 1..21: mol_type = other RNA
ttgaaggaatagtgtcttgta

SEQ ID NO: 21821 - RNA, 21 nt, synthetic construct
  source 1..21: mol_type = other RNA
ttgaatctgcaggattaaaag

SEQ ID NO: 21822 - RNA, 21 nt, synthetic construct
  source 1..21: mol_type = other RNA
ttgaatgaagaataggtctgt

SEQ ID NO: 21823 - RNA, 21 nt, synthetic construct
  source 1..21: mol_type = other RNA
ttgaattgcaactgtggacag

SEQ ID NO: 21824 - RNA, 21 nt, synthetic construct
  source 1..21: mol_type = other RNA
ttgacattttattaatcttga

SEQ ID NO: 21825 - RNA, 21 nt, synthetic construct
  source 1..21: mol_type = other RNA
ttgactactgctttacagaga

SEQ ID NO: 21826 - RNA, 21 nt, synthetic construct
  source 1..21: mol_type = other RNA
ttgactcttacccagcagtgc

SEQ ID NO: 21827 - RNA, 21 nt, synthetic construct
  source 1..21: mol_type = other RNA
ttgagaaaccagtgcttccct

SEQ ID NO: 21828 - RNA, 21 nt, synthetic construct
  source 1..21: mol_type = other RNA
ttgagacccttgctgcaccac

SEQ ID NO: 21829 - RNA, 21 nt, synthetic construct
  source 1..21: mol_type = other RNA
ttgagcattggaaaagtggct

SEQ ID NO: 21830 - RNA, 21 nt, synthetic construct
  source 1..21: mol_type = other RNA
ttgagctggggcttgactctt

SEQ ID NO: 21831 - RNA, 21 nt, synthetic construct
  source 1..21: mol_type = other RNA
ttgaggaaagtctatccaggg

SEQ ID NO: 21832 - RNA, 21 nt, synthetic construct
  source 1..21: mol_type = other RNA
ttgatccatcttacatcttgt

SEQ ID NO: 21833 - RNA, 21 nt, synthetic construct
  source 1..21: mol_type = other RNA
ttgatcccattttccatttgt

SEQ ID NO: 21834 - RNA, 21 nt, synthetic construct
  source 1..21: mol_type = other RNA
ttgatcttgggtagcctggtg

SEQ ID NO: 21835 - RNA, 21 nt, synthetic construct
  source 1..21: mol_type = other RNA
ttgatggttttctctttttac

SEQ ID NO: 21836 - RNA, 21 nt, synthetic construct
  source 1..21: mol_type = other RNA
ttgattggaggagctctaagc

SEQ ID NO: 21837 - RNA, 21 nt, synthetic construct
  source 1..21: mol_type = other RNA
ttgcaactgtggacagtatag

SEQ ID NO: 21838 - RNA, 21 nt, synthetic construct
  source 1..21: mol_type = other RNA
ttgcagtgtggcccagggaag

SEQ ID NO: 21839 - RNA, 21 nt, synthetic construct
  source 1..21: mol_type = other RNA
ttgcagttacccaaatcatag

SEQ ID NO: 21840 - RNA, 21 nt, synthetic construct
  source 1..21: mol_type = other RNA
ttgcatccctaccaggcatct

SEQ ID NO: 21841 - RNA, 21 nt, synthetic construct
  source 1..21: mol_type = other RNA
ttgcctaacctcagatccaat

SEQ ID NO: 21842 - RNA, 21 nt, synthetic construct
  source 1..21: mol_type = other RNA
ttgctaagatgcctggtaggg

SEQ ID NO: 21843 - RNA, 21 nt, synthetic construct
  source 1..21: mol_type = other RNA
ttgctcatcagctgtccttta

SEQ ID NO: 21844 - RNA, 21 nt, synthetic construct
  source 1..21: mol_type = other RNA
ttgctcctctagtattcagac

SEQ ID NO: 21845 - RNA, 21 nt, synthetic construct
  source 1..21: mol_type = other RNA
ttgctgcaccaccaaagtgta

SEQ ID NO: 21846 - RNA, 21 nt, synthetic construct
  source 1..21: mol_type = other RNA
ttgctgcttttaatcctgcag

SEQ ID NO: 21847 - RNA, 21 nt, synthetic construct
  source 1..21: mol_type = other RNA
ttgctgtaaacagtacaagcc

SEQ ID NO: 21848 - RNA, 21 nt, synthetic construct
  source 1..21: mol_type = other RNA
ttgctgtctctgtctttagtg

SEQ ID NO: 21849 - RNA, 21 nt, synthetic construct
  source 1..21: mol_type = other RNA
ttgcttgagaaaccagtgctt

SEQ ID NO: 21850 - RNA, 21 nt, synthetic construct
  source 1..21: mol_type = other RNA
ttgctttcactgttgtccaag

SEQ ID NO: 21851 - RNA, 21 nt, synthetic construct
  source 1..21: mol_type = other RNA
ttggaaaagtggctggtatga

SEQ ID NO: 21852 - RNA, 21 nt, synthetic construct
  source 1..21: mol_type = other RNA
ttggaagctatcacacaggca

SEQ ID NO: 21853 - RNA, 21 nt, synthetic construct
  source 1..21: mol_type = other RNA
ttggaatgctacccttgctgc

SEQ ID NO: 21854 - RNA, 21 nt, synthetic construct
  source 1..21: mol_type = other RNA
ttggacaacagtgaaagcaag

SEQ ID NO: 21855 - RNA, 21 nt, synthetic construct
  source 1..21: mol_type = other RNA
ttggacacccctggtttacag

SEQ ID NO: 21856 - RNA, 21 nt, synthetic construct
  source 1..21: mol_type = other RNA
ttggacttagctttcagctaa

SEQ ID NO: 21857 - RNA, 21 nt, synthetic construct
  source 1..21: mol_type = other RNA
ttggagcatttttctagagac

SEQ ID NO: 21858 - RNA, 21 nt, synthetic construct
  source 1..21: mol_type = other RNA
ttggaggagctctaagcatca

SEQ ID NO: 21859 - RNA, 21 nt, synthetic construct
  source 1..21: mol_type = other RNA
ttggatctgaggttaggcaac

SEQ ID NO: 21860 - RNA, 21 nt, synthetic construct
  source 1..21: mol_type = other RNA
ttggctagacatcagagtata

SEQ ID NO: 21861 - RNA, 21 nt, synthetic construct
  source 1..21: mol_type = other RNA
ttgggccacatataaaggaca

SEQ ID NO: 21862 - RNA, 21 nt, synthetic construct
  source 1..21: mol_type = other RNA
ttgggtaactgcaattcattc

SEQ ID NO: 21863 - RNA, 21 nt, synthetic construct
  source 1..21: mol_type = other RNA
ttgggtagcctggtgtctcgc

SEQ ID NO: 21864 - RNA, 21 nt, synthetic construct
  source 1..21: mol_type = other RNA
ttgggtcatagaacaacagac

SEQ ID NO: 21865 - RNA, 21 nt, synthetic construct
  source 1..21: mol_type = other RNA
ttgggtcgcattcaaagctgt

SEQ ID NO: 21866 - RNA, 21 nt, synthetic construct
  source 1..21: mol_type = other RNA
ttggtattataattcctcagg

SEQ ID NO: 21867 - RNA, 21 nt, synthetic construct
  source 1..21: mol_type = other RNA
ttggtcatgccttccatggtc

SEQ ID NO: 21868 - RNA, 21 nt, synthetic construct
  source 1..21: mol_type = other RNA
ttggtggtgcagcaagggtct

SEQ ID NO: 21869 - RNA, 21 nt, synthetic construct
  source 1..21: mol_type = other RNA
ttggttccaccacaaattaag

SEQ ID NO: 21870 - RNA, 21 nt, synthetic construct
  source 1..21: mol_type = other RNA
ttgtactcctgagctcctagt

SEQ ID NO: 21871 - RNA, 21 nt, synthetic construct
  source 1..21: mol_type = other RNA
ttgtactgcgtgggtcatagt

SEQ ID NO: 21872 - RNA, 21 nt, synthetic construct
  source 1..21: mol_type = other RNA
ttgtactgtttacagcaagtt

SEQ ID NO: 21873 - RNA, 21 nt, synthetic construct
  source 1..21: mol_type = other RNA
ttgtacttgctcctctagtat

SEQ ID NO: 21874 - RNA, 21 nt, synthetic construct
  source 1..21: mol_type = other RNA
ttgtaggacagaaatttaggc

SEQ ID NO: 21875 - RNA, 21 nt, synthetic construct
  source 1..21: mol_type = other RNA
ttgtatcacacagacctattc

SEQ ID NO: 21876 - RNA, 21 nt, synthetic construct
  source 1..21: mol_type = other RNA
ttgtcattgctgatttaaatt

SEQ ID NO: 21877 - RNA, 21 nt, synthetic construct
  source 1..21: mol_type = other RNA
ttgtccaaggcaggcacatct

SEQ ID NO: 21878 - RNA, 21 nt, synthetic construct
  source 1..21: mol_type = other RNA
ttgtcctaaaggaagatagag

SEQ ID NO: 21879 - RNA, 21 nt, synthetic construct
  source 1..21: mol_type = other RNA
ttgtctaacccgcgggccgca

SEQ ID NO: 21880 - RNA, 21 nt, synthetic construct
  source 1..21: mol_type = other RNA
ttgtggggtggttctttttgg

SEQ ID NO: 21881 - RNA, 21 nt, synthetic construct
  source 1..21: mol_type = other RNA
ttgtggtggaaccaatctgtc

SEQ ID NO: 21882 - RNA, 21 nt, synthetic construct
  source 1..21: mol_type = other RNA
ttgtgtgtgtagtatgtggaa

SEQ ID NO: 21883 - RNA, 21 nt, synthetic construct
  source 1..21: mol_type = other RNA
ttgttaggatgattgtcctaa

SEQ ID NO: 21884 - RNA, 21 nt, synthetic construct
  source 1..21: mol_type = other RNA
ttgttctatgacccaaactgc

SEQ ID NO: 21885 - RNA, 21 nt, synthetic construct
  source 1..21: mol_type = other RNA
ttgttctgtggattacagaat

SEQ ID NO: 21886 - RNA, 21 nt, synthetic construct
  source 1..21: mol_type = other RNA
ttgttggacttagctttcagc

SEQ ID NO: 21887 - RNA, 21 nt, synthetic construct
  source 1..21: mol_type = other RNA
ttgttgtacttgctcctctag

SEQ ID NO: 21888 - RNA, 21 nt, synthetic construct
  source 1..21: mol_type = other RNA
ttgttgtcattgctgatttaa

SEQ ID NO: 21889 - RNA, 21 nt, synthetic construct
  source 1..21: mol_type = other RNA
ttgttttctataactcaagat

SEQ ID NO: 21890 - RNA, 21 nt, synthetic construct
  source 1..21: mol_type = other RNA
tttaaaaaagcagttttcttc

SEQ ID NO: 21891 - RNA, 21 nt, synthetic construct
  source 1..21: mol_type = other RNA
tttaaaaatggtttgttggac

SEQ ID NO: 21892 - RNA, 21 nt, synthetic construct
  source 1..21: mol_type = other RNA
tttaaaagggcagtttgggtc

SEQ ID NO: 21893 - RNA, 21 nt, synthetic construct
  source 1..21: mol_type = other RNA
tttaaagatgtgcctgccttg

SEQ ID NO: 21894 - RNA, 21 nt, synthetic construct
  source 1..21: mol_type = other RNA
tttaaatcagcaatgacaaca

SEQ ID NO: 21895 - RNA, 21 nt, synthetic construct
  source 1..21: mol_type = other RNA
tttaacctgatgctacacttt

SEQ ID NO: 21896 - RNA, 21 nt, synthetic construct
  source 1..21: mol_type = other RNA
tttaactatgtagctcctgta

SEQ ID NO: 21897 - RNA, 21 nt, synthetic construct
  source 1..21: mol_type = other RNA
tttaagaacgtgaactaggga

SEQ ID NO: 21898 - RNA, 21 nt, synthetic construct
  source 1..21: mol_type = other RNA
tttaagtaaatggagtgagcg

SEQ ID NO: 21899 - RNA, 21 nt, synthetic construct
  source 1..21: mol_type = other RNA
tttaatcctgcagattcaaat

SEQ ID NO: 21900 - RNA, 21 nt, synthetic construct
  source 1..21: mol_type = other RNA
tttaatggaatctcacctccc

SEQ ID NO: 21901 - RNA, 21 nt, synthetic construct
  source 1..21: mol_type = other RNA
tttacagagaattggatctga

SEQ ID NO: 21902 - RNA, 21 nt, synthetic construct
  source 1..21: mol_type = other RNA
tttacagcaagttgtctaacc

SEQ ID NO: 21903 - RNA, 21 nt, synthetic construct
  source 1..21: mol_type = other RNA
tttacaggatgaattctgttc

SEQ ID NO: 21904 - RNA, 21 nt, synthetic construct
  source 1..21: mol_type = other RNA
tttacatgtcgctcactccat

SEQ ID NO: 21905 - RNA, 21 nt, synthetic construct
  source 1..21: mol_type = other RNA
tttactgagcagtaaggaaat

SEQ ID NO: 21906 - RNA, 21 nt, synthetic construct
  source 1..21: mol_type = other RNA
tttacttaaagttggctagac

SEQ ID NO: 21907 - RNA, 21 nt, synthetic construct
  source 1..21: mol_type = other RNA
tttagaggaagaaaaagggag

SEQ ID NO: 21908 - RNA, 21 nt, synthetic construct
  source 1..21: mol_type = other RNA
tttagctgaaagctaagtcca

SEQ ID NO: 21909 - RNA, 21 nt, synthetic construct
  source 1..21: mol_type = other RNA
tttagcttttgcttgagaaac

SEQ ID NO: 21910 - RNA, 21 nt, synthetic construct
  source 1..21: mol_type = other RNA
tttaggacaatcatcctaaca

SEQ ID NO: 21911 - RNA, 21 nt, synthetic construct
  source 1..21: mol_type = other RNA
tttaggctgggttcatttgta

SEQ ID NO: 21912 - RNA, 21 nt, synthetic construct
  source 1..21: mol_type = other RNA
tttagggaggtgagattccat

SEQ ID NO: 21913 - RNA, 21 nt, synthetic construct
  source 1..21: mol_type = other RNA
tttagtcataccagccacttt

SEQ ID NO: 21914 - RNA, 21 nt, synthetic construct
  source 1..21: mol_type = other RNA
tttagtgttatcttttgatcc

SEQ ID NO: 21915 - RNA, 21 nt, synthetic construct
  source 1..21: mol_type = other RNA
tttataccatttgagaccctt

SEQ ID NO: 21916 - RNA, 21 nt, synthetic construct
  source 1..21: mol_type = other RNA
tttatatgtggcccaagacag

SEQ ID NO: 21917 - RNA, 21 nt, synthetic construct
  source 1..21: mol_type = other RNA
tttatcctgaggaattataat

SEQ ID NO: 21918 - RNA, 21 nt, synthetic construct
  source 1..21: mol_type = other RNA
tttatcctttttccttagctg

SEQ ID NO: 21919 - RNA, 21 nt, synthetic construct
  source 1..21: mol_type = other RNA
tttatctaatttgaattgcaa

SEQ ID NO: 21920 - RNA, 21 nt, synthetic construct
  source 1..21: mol_type = other RNA
tttatgtctgtctctagaaaa

SEQ ID NO: 21921 - RNA, 21 nt, synthetic construct
  source 1..21: mol_type = other RNA
tttattaatcttgagcattgg

SEQ ID NO: 21922 - RNA, 21 nt, synthetic construct
  source 1..21: mol_type = other RNA
tttattcctccctagttcacg

SEQ ID NO: 21923 - RNA, 21 nt, synthetic construct
  source 1..21: mol_type = other RNA
tttatttccttactgctcagt

SEQ ID NO: 21924 - RNA, 21 nt, synthetic construct
  source 1..21: mol_type = other RNA
tttcacctgtcattttcatgc

SEQ ID NO: 21925 - RNA, 21 nt, synthetic construct
  source 1..21: mol_type = other RNA
tttcactattttccacatact

SEQ ID NO: 21926 - RNA, 21 nt, synthetic construct
  source 1..21: mol_type = other RNA
tttcactgttgtccaaggcag

SEQ ID NO: 21927 - RNA, 21 nt, synthetic construct
  source 1..21: mol_type = other RNA
tttcacttcctggaaacactt

SEQ ID NO: 21928 - RNA, 21 nt, synthetic construct
  source 1..21: mol_type = other RNA
tttcatgctctatcttccttt

SEQ ID NO: 21929 - RNA, 21 nt, synthetic construct
  source 1..21: mol_type = other RNA
tttcattttatcctttttcct

SEQ ID NO: 21930 - RNA, 21 nt, synthetic construct
  source 1..21: mol_type = other RNA
tttccaatgctcaagattaat

SEQ ID NO: 21931 - RNA, 21 nt, synthetic construct
  source 1..21: mol_type = other RNA
tttccacatactacacacaca

SEQ ID NO: 21932 - RNA, 21 nt, synthetic construct
  source 1..21: mol_type = other RNA
tttccaggaagtgaaaacttg

SEQ ID NO: 21933 - RNA, 21 nt, synthetic construct
  source 1..21: mol_type = other RNA
tttccatttgttgtacttgct

SEQ ID NO: 21934 - RNA, 21 nt, synthetic construct
  source 1..21: mol_type = other RNA
tttccttactgctcagtaaaa

SEQ ID NO: 21935 - RNA, 21 nt, synthetic construct
  source 1..21: mol_type = other RNA
tttccttagctgggattctgt

SEQ ID NO: 21936 - RNA, 21 nt, synthetic construct
  source 1..21: mol_type = other RNA
tttcgcgagacaccaggctac

SEQ ID NO: 21937 - RNA, 21 nt, synthetic construct
  source 1..21: mol_type = other RNA
tttcggcttccctgggccaca

SEQ ID NO: 21938 - RNA, 21 nt, synthetic construct
  source 1..21: mol_type = other RNA
tttctagagacagacataaag

SEQ ID NO: 21939 - RNA, 21 nt, synthetic construct
  source 1..21: mol_type = other RNA
tttctataactcaagatatga

SEQ ID NO: 21940 - RNA, 21 nt, synthetic construct
  source 1..21: mol_type = other RNA
tttctattaagatttaacctg

SEQ ID NO: 21941 - RNA, 21 nt, synthetic construct
  source 1..21: mol_type = other RNA
tttctccctctcttgatcttg

SEQ ID NO: 21942 - RNA, 21 nt, synthetic construct
  source 1..21: mol_type = other RNA
tttctctttttactgagcagt

SEQ ID NO: 21943 - RNA, 21 nt, synthetic construct
  source 1..21: mol_type = other RNA
tttctgtcctacaagttttca

SEQ ID NO: 21944 - RNA, 21 nt, synthetic construct
  source 1..21: mol_type = other RNA
tttctgttcttaccagttagt

SEQ ID NO: 21945 - RNA, 21 nt, synthetic construct
  source 1..21: mol_type = other RNA
tttcttcctctaaatacctct

SEQ ID NO: 21946 - RNA, 21 nt, synthetic construct
  source 1..21: mol_type = other RNA
tttcttctgactcctgagcag

SEQ ID NO: 21947 - RNA, 21 nt, synthetic construct
  source 1..21: mol_type = other RNA
tttgaaatccaaactcattaa

SEQ ID NO: 21948 - RNA, 21 nt, synthetic construct
  source 1..21: mol_type = other RNA
tttgaaggaatagtgtcttgt

SEQ ID NO: 21949 - RNA, 21 nt, synthetic construct
  source 1..21: mol_type = other RNA
tttgaatctgcaggattaaaa

SEQ ID NO: 21950 - RNA, 21 nt, synthetic construct
  source 1..21: mol_type = other RNA
tttgaattgcaactgtggaca

SEQ ID NO: 21951 - RNA, 21 nt, synthetic construct
  source 1..21: mol_type = other RNA
tttgacattttattaatcttg

SEQ ID NO: 21952 - RNA, 21 nt, synthetic construct
  source 1..21: mol_type = other RNA
tttgagacccttgctgcacca

SEQ ID NO: 21953 - RNA, 21 nt, synthetic construct
  source 1..21: mol_type = other RNA
tttgatccatcttacatcttg

SEQ ID NO: 21954 - RNA, 21 nt, synthetic construct
  source 1..21: mol_type = other RNA
tttgcatccctaccaggcatc

SEQ ID NO: 21955 - RNA, 21 nt, synthetic construct
  source 1..21: mol_type = other RNA
tttgctcatcagctgtccttt

SEQ ID NO: 21956 - RNA, 21 nt, synthetic construct
  source 1..21: mol_type = other RNA
tttgcttgagaaaccagtgct

SEQ ID NO: 21957 - RNA, 21 nt, synthetic construct
  source 1..21: mol_type = other RNA
tttggaagctatcacacaggc

SEQ ID NO: 21958 - RNA, 21 nt, synthetic construct
  source 1..21: mol_type = other RNA
tttggaatgctacccttgctg

SEQ ID NO: 21959 - RNA, 21 nt, synthetic construct
  source 1..21: mol_type = other RNA
tttggagcatttttctagaga

SEQ ID NO: 21960 - RNA, 21 nt, synthetic construct
  source 1..21: mol_type = other RNA
tttgggtaactgcaattcatt

SEQ ID NO: 21961 - RNA, 21 nt, synthetic construct
  source 1..21: mol_type = other RNA
tttgggtcatagaacaacaga

SEQ ID NO: 21962 - RNA, 21 nt, synthetic construct
  source 1..21: mol_type = other RNA
tttggtcatgccttccatggt

SEQ ID NO: 21963 - RNA, 21 nt, synthetic construct
  source 1..21: mol_type = other RNA
tttggtggtgcagcaagggtc

SEQ ID NO: 21964 - RNA, 21 nt, synthetic construct
  source 1..21: mol_type = other RNA
tttgtactgcgtgggtcatag

SEQ ID NO: 21965 - RNA, 21 nt, synthetic construct
  source 1..21: mol_type = other RNA
tttgtatcacacagacctatt

SEQ ID NO: 21966 - RNA, 21 nt, synthetic construct
  source 1..21: mol_type = other RNA
tttgtggggtggttctttttg

SEQ ID NO: 21967 - RNA, 21 nt, synthetic construct
  source 1..21: mol_type = other RNA
tttgtggtggaaccaatctgt

SEQ ID NO: 21968 - RNA, 21 nt, synthetic construct
  source 1..21: mol_type = other RNA
tttgtgtgtgtagtatgtgga

SEQ ID NO: 21969 - RNA, 21 nt, synthetic construct
  source 1..21: mol_type = other RNA
tttgttggacttagctttcag

SEQ ID NO: 21970 - RNA, 21 nt, synthetic construct
  source 1..21: mol_type = other RNA
tttgttgtacttgctcctcta

SEQ ID NO: 21971 - RNA, 21 nt, synthetic construct
  source 1..21: mol_type = other RNA
ttttaaaaaagcagttttctt

SEQ ID NO: 21972 - RNA, 21 nt, synthetic construct
  source 1..21: mol_type = other RNA
ttttaaaagggcagtttgggt

SEQ ID NO: 21973 - RNA, 21 nt, synthetic construct
  source 1..21: mol_type = other RNA
ttttaaagatgtgcctgcctt

SEQ ID NO: 21974 - RNA, 21 nt, synthetic construct
  source 1..21: mol_type = other RNA
ttttaatcctgcagattcaaa

SEQ ID NO: 21975 - RNA, 21 nt, synthetic construct
  source 1..21: mol_type = other RNA
ttttactgagcagtaaggaaa

SEQ ID NO: 21976 - RNA, 21 nt, synthetic construct
  source 1..21: mol_type = other RNA
ttttagcttttgcttgagaaa

SEQ ID NO: 21977 - RNA, 21 nt, synthetic construct
  source 1..21: mol_type = other RNA
ttttagggaggtgagattcca

SEQ ID NO: 21978 - RNA, 21 nt, synthetic construct
  source 1..21: mol_type = other RNA
ttttataccatttgagaccct

SEQ ID NO: 21979 - RNA, 21 nt, synthetic construct
  source 1..21: mol_type = other RNA
ttttatcctgaggaattataa

SEQ ID NO: 21980 - RNA, 21 nt, synthetic construct
  source 1..21: mol_type = other RNA
ttttatcctttttccttagct

SEQ ID NO: 21981 - RNA, 21 nt, synthetic construct
  source 1..21: mol_type = other RNA
ttttatctaatttgaattgca

SEQ ID NO: 21982 - RNA, 21 nt, synthetic construct
  source 1..21: mol_type = other RNA
ttttattaatcttgagcattg

SEQ ID NO: 21983 - RNA, 21 nt, synthetic construct
  source 1..21: mol_type = other RNA
ttttattcctccctagttcac

SEQ ID NO: 21984 - RNA, 21 nt, synthetic construct
  source 1..21: mol_type = other RNA
ttttatttccttactgctcag

SEQ ID NO: 21985 - RNA, 21 nt, synthetic construct
  source 1..21: mol_type = other RNA
ttttcactattttccacatac

SEQ ID NO: 21986 - RNA, 21 nt, synthetic construct
  source 1..21: mol_type = other RNA
ttttcacttcctggaaacact

SEQ ID NO: 21987 - RNA, 21 nt, synthetic construct
  source 1..21: mol_type = other RNA
ttttcatgctctatcttcctt

SEQ ID NO: 21988 - RNA, 21 nt, synthetic construct
  source 1..21: mol_type = other RNA
ttttcattttatcctttttcc

SEQ ID NO: 21989 - RNA, 21 nt, synthetic construct
  source 1..21: mol_type = other RNA
ttttccacatactacacacac

SEQ ID NO: 21990 - RNA, 21 nt, synthetic construct
  source 1..21: mol_type = other RNA
ttttccatttgttgtacttgc

SEQ ID NO: 21991 - RNA, 21 nt, synthetic construct
  source 1..21: mol_type = other RNA
ttttccttagctgggattctg

SEQ ID NO: 21992 - RNA, 21 nt, synthetic construct
  source 1..21: mol_type = other RNA
ttttctagagacagacataaa

SEQ ID NO: 21993 - RNA, 21 nt, synthetic construct
  source 1..21: mol_type = other RNA
ttttctataactcaagatatg

SEQ ID NO: 21994 - RNA, 21 nt, synthetic construct
  source 1..21: mol_type = other RNA
ttttctattaagatttaacct

SEQ ID NO: 21995 - RNA, 21 nt, synthetic construct
  source 1..21: mol_type = other RNA
ttttctctttttactgagcag

SEQ ID NO: 21996 - RNA, 21 nt, synthetic construct
  source 1..21: mol_type = other RNA
ttttcttcctctaaatacctc

SEQ ID NO: 21997 - RNA, 21 nt, synthetic construct
  source 1..21: mol_type = other RNA
ttttcttctgactcctgagca

SEQ ID NO: 21998 - RNA, 21 nt, synthetic construct
  source 1..21: mol_type = other RNA
ttttgaaatccaaactcatta

SEQ ID NO: 21999 - RNA, 21 nt, synthetic construct
  source 1..21: mol_type = other RNA
ttttgaaggaatagtgtcttg

SEQ ID NO: 22000 - RNA, 21 nt, synthetic construct
  source 1..21: mol_type = other RNA
ttttgatccatcttacatctt

SEQ ID NO: 22001 - RNA, 21 nt, synthetic construct
  source 1..21: mol_type = other RNA
ttttgctcatcagctgtcctt

SEQ ID NO: 22002 - RNA, 21 nt, synthetic construct
  source 1..21: mol_type = other RNA
ttttgcttgagaaaccagtgc

SEQ ID NO: 22003 - RNA, 21 nt, synthetic construct
  source 1..21: mol_type = other RNA
ttttggaatgctacccttgct

SEQ ID NO: 22004 - RNA, 21 nt, synthetic construct
  source 1..21: mol_type = other RNA
ttttggagcatttttctagag

SEQ ID NO: 22005 - RNA, 21 nt, synthetic construct
  source 1..21: mol_type = other RNA
tttttaaaagggcagtttggg

SEQ ID NO: 22006 - RNA, 21 nt, synthetic construct
  source 1..21: mol_type = other RNA
tttttaaagatgtgcctgcct

SEQ ID NO: 22007 - RNA, 21 nt, synthetic construct
  source 1..21: mol_type = other RNA
tttttactgagcagtaaggaa

SEQ ID NO: 22008 - RNA, 21 nt, synthetic construct
  source 1..21: mol_type = other RNA
tttttatctaatttgaattgc

SEQ ID NO: 22009 - RNA, 21 nt, synthetic construct
  source 1..21: mol_type = other RNA
tttttcactattttccacata

SEQ ID NO: 22010 - RNA, 21 nt, synthetic construct
  source 1..21: mol_type = other RNA
tttttccttagctgggattct

SEQ ID NO: 22011 - RNA, 21 nt, synthetic construct
  source 1..21: mol_type = other RNA
tttttctagagacagacataa

SEQ ID NO: 22012 - RNA, 21 nt, synthetic construct
  source 1..21: mol_type = other RNA
tttttcttcctctaaatacct

SEQ ID NO: 22013 - RNA, 21 nt, synthetic construct
  source 1..21: mol_type = other RNA
tttttgaaatccaaactcatt

SEQ ID NO: 22014 - RNA, 21 nt, synthetic construct
  source 1..21: mol_type = other RNA
tttttgaaggaatagtgtctt

SEQ ID NO: 22015 - RNA, 21 nt, synthetic construct
  source 1..21: mol_type = other RNA
tttttgctcatcagctgtcct

SEQ ID NO: 22016 - RNA, 21 nt, synthetic construct
  source 1..21: mol_type = other RNA
tttttggaatgctacccttgc

SEQ ID NO: 22017 - RNA, 21 nt, synthetic construct
  source 1..21: mol_type = other RNA
tttttggagcatttttctaga

SEQ ID NO: 22018 - RNA, 21 nt, synthetic construct
  source 1..21: mol_type = other RNA
ttttttaaaagggcagtttgg

SEQ ID NO: 22019 - RNA, 21 nt, synthetic construct
  source 1..21: mol_type = other RNA
ttttttgaaatccaaactcat

SEQ ID NO: 22020 - RNA, 21 nt, synthetic construct
  source 1..21: mol_type = other RNA
ttttttgctcatcagctgtcc

SEQ ID NO: 22021 - RNA, 22 nt, synthetic construct
  source 1..22: mol_type = other RNA
aaaaaagcagttttcttctgac

SEQ ID NO: 22022 - RNA, 22 nt, synthetic construct
  source 1..22: mol_type = other RNA
aaaaaatgcataatgaatttta

SEQ ID NO: 22023 - RNA, 22 nt, synthetic construct
  source 1..22: mol_type = other RNA
aaaaagaaccaccccacaaaga

SEQ ID NO: 22024 - RNA, 22 nt, synthetic construct
  source 1..22: mol_type = other RNA
aaaaagagaaaaccatcaatgt

SEQ ID NO: 22025 - RNA, 22 nt, synthetic construct
  source 1..22: mol_type = other RNA
aaaaagcagttttcttctgact

SEQ ID NO: 22026 - RNA, 22 nt, synthetic construct
  source 1..22: mol_type = other RNA
aaaaagcatttggtgttaaaat

SEQ ID NO: 22027 - RNA, 22 nt, synthetic construct
  source 1..22: mol_type = other RNA
aaaaagctgttaaattgaggaa

SEQ ID NO: 22028 - RNA, 22 nt, synthetic construct
  source 1..22: mol_type = other RNA
aaaaagggagatgttgcctaac

SEQ ID NO: 22029 - RNA, 22 nt, synthetic construct
  source 1..22: mol_type = other RNA
aaaaatgataagtagtgataat

SEQ ID NO: 22030 - RNA, 22 nt, synthetic construct
  source 1..22: mol_type = other RNA
aaaaatgcataatgaattttag

SEQ ID NO: 22031 - RNA, 22 nt, synthetic construct
  source 1..22: mol_type = other RNA
aaaaatgctccaaaaatgataa

SEQ ID NO: 22032 - RNA, 22 nt, synthetic construct
  source 1..22: mol_type = other RNA
aaaaatggtttgttggacttag

SEQ ID NO: 22033 - RNA, 22 nt, synthetic construct
  source 1..22: mol_type = other RNA
aaaaattcagttctttagtcat

SEQ ID NO: 22034 - RNA, 22 nt, synthetic construct
  source 1..22: mol_type = other RNA
aaaaattttagcttttgcttga

SEQ ID NO: 22035 - RNA, 22 nt, synthetic construct
  source 1..22: mol_type = other RNA
aaaacaagcagttaaatgaaat

SEQ ID NO: 22036 - RNA, 22 nt, synthetic construct
  source 1..22: mol_type = other RNA
aaaacaatcacaaagtaagttt

SEQ ID NO: 22037 - RNA, 22 nt, synthetic construct
  source 1..22: mol_type = other RNA
aaaaccatcaatgtccacgtat

SEQ ID NO: 22038 - RNA, 22 nt, synthetic construct
  source 1..22: mol_type = other RNA
aaaactcaggtgatcatgcttt

SEQ ID NO: 22039 - RNA, 22 nt, synthetic construct
  source 1..22: mol_type = other RNA
aaaactcctaaaactttaagaa

SEQ ID NO: 22040 - RNA, 22 nt, synthetic construct
  source 1..22: mol_type = other RNA
aaaactgcttttttaaaagggc

SEQ ID NO: 22041 - RNA, 22 nt, synthetic construct
  source 1..22: mol_type = other RNA
aaaacttgtaggacagaaattt

SEQ ID NO: 22042 - RNA, 22 nt, synthetic construct
  source 1..22: mol_type = other RNA
aaaagaaccaccccacaaagat

SEQ ID NO: 22043 - RNA, 22 nt, synthetic construct
  source 1..22: mol_type = other RNA
aaaagagaaaaccatcaatgtc

SEQ ID NO: 22044 - RNA, 22 nt, synthetic construct
  source 1..22: mol_type = other RNA
aaaagataacactaaagacaga

SEQ ID NO: 22045 - RNA, 22 nt, synthetic construct
  source 1..22: mol_type = other RNA
aaaagcactgctgggtaagagt

SEQ ID NO: 22046 - RNA, 22 nt, synthetic construct
  source 1..22: mol_type = other RNA
aaaagcagcaagggtagcattc

SEQ ID NO: 22047 - RNA, 22 nt, synthetic construct
  source 1..22: mol_type = other RNA
aaaagcagttttcttctgactc

SEQ ID NO: 22048 - RNA, 22 nt, synthetic construct
  source 1..22: mol_type = other RNA
aaaagcatttggtgttaaaatg

SEQ ID NO: 22049 - RNA, 22 nt, synthetic construct
  source 1..22: mol_type = other RNA
aaaagctgaagctctctggccc

SEQ ID NO: 22050 - RNA, 22 nt, synthetic construct
  source 1..22: mol_type = other RNA
aaaagctgttaaattgaggaaa

SEQ ID NO: 22051 - RNA, 22 nt, synthetic construct
  source 1..22: mol_type = other RNA
aaaagggagatgttgcctaacc

SEQ ID NO: 22052 - RNA, 22 nt, synthetic construct
  source 1..22: mol_type = other RNA
aaaagggcagtttgggtcatag

SEQ ID NO: 22053 - RNA, 22 nt, synthetic construct
  source 1..22: mol_type = other RNA
aaaagtggctggtatgactaaa

SEQ ID NO: 22054 - RNA, 22 nt, synthetic construct
  source 1..22: mol_type = other RNA
aaaatgaaaaagctgttaaatt

SEQ ID NO: 22055 - RNA, 22 nt, synthetic construct
  source 1..22: mol_type = other RNA
aaaatgacaggtgaaactccat

SEQ ID NO: 22056 - RNA, 22 nt, synthetic construct
  source 1..22: mol_type = other RNA
aaaatgataagtagtgataatc

SEQ ID NO: 22057 - RNA, 22 nt, synthetic construct
  source 1..22: mol_type = other RNA
aaaatgcataatgaattttagg

SEQ ID NO: 22058 - RNA, 22 nt, synthetic construct
  source 1..22: mol_type = other RNA
aaaatgctccaaaaatgataag

SEQ ID NO: 22059 - RNA, 22 nt, synthetic construct
  source 1..22: mol_type = other RNA
aaaatgggatcaagtatgagtg

SEQ ID NO: 22060 - RNA, 22 nt, synthetic construct
  source 1..22: mol_type = other RNA
aaaatggtttgttggacttagc

SEQ ID NO: 22061 - RNA, 22 nt, synthetic construct
  source 1..22: mol_type = other RNA
aaaatgtcaaaccataaagaca

SEQ ID NO: 22062 - RNA, 22 nt, synthetic construct
  source 1..22: mol_type = other RNA
aaaatgttggtattataattcc

SEQ ID NO: 22063 - RNA, 22 nt, synthetic construct
  source 1..22: mol_type = other RNA
aaaattcagttctttagtcata

SEQ ID NO: 22064 - RNA, 22 nt, synthetic construct
  source 1..22: mol_type = other RNA
aaaattttagcttttgcttgag

SEQ ID NO: 22065 - RNA, 22 nt, synthetic construct
  source 1..22: mol_type = other RNA
aaacaagcagttaaatgaaatg

SEQ ID NO: 22066 - RNA, 22 nt, synthetic construct
  source 1..22: mol_type = other RNA
aaacaatcacaaagtaagtttt

SEQ ID NO: 22067 - RNA, 22 nt, synthetic construct
  source 1..22: mol_type = other RNA
aaacacttgattggaggagctc

SEQ ID NO: 22068 - RNA, 22 nt, synthetic construct
  source 1..22: mol_type = other RNA
aaacagtacaagccagtaatgg

SEQ ID NO: 22069 - RNA, 22 nt, synthetic construct
  source 1..22: mol_type = other RNA
aaacatttaagaacgtgaacta

SEQ ID NO: 22070 - RNA, 22 nt, synthetic construct
  source 1..22: mol_type = other RNA
aaaccagacagattggttccac

SEQ ID NO: 22071 - RNA, 22 nt, synthetic construct
  source 1..22: mol_type = other RNA
aaaccaggggtgtccaatcttt

SEQ ID NO: 22072 - RNA, 22 nt, synthetic construct
  source 1..22: mol_type = other RNA
aaaccagtgcttccctccctca

SEQ ID NO: 22073 - RNA, 22 nt, synthetic construct
  source 1..22: mol_type = other RNA
aaaccataaagacatttacatg

SEQ ID NO: 22074 - RNA, 22 nt, synthetic construct
  source 1..22: mol_type = other RNA
aaaccatcaatgtccacgtatt

SEQ ID NO: 22075 - RNA, 22 nt, synthetic construct
  source 1..22: mol_type = other RNA
aaaccatttttaaagatgtgcc

SEQ ID NO: 22076 - RNA, 22 nt, synthetic construct
  source 1..22: mol_type = other RNA
aaactcaggtgatcatgcttta

SEQ ID NO: 22077 - RNA, 22 nt, synthetic construct
  source 1..22: mol_type = other RNA
aaactcattaacgcttgctttc

SEQ ID NO: 22078 - RNA, 22 nt, synthetic construct
  source 1..22: mol_type = other RNA
aaactccattactggcttgtac

SEQ ID NO: 22079 - RNA, 22 nt, synthetic construct
  source 1..22: mol_type = other RNA
aaactcctaaaactttaagaaa

SEQ ID NO: 22080 - RNA, 22 nt, synthetic construct
  source 1..22: mol_type = other RNA
aaactgcccttttaaaaaagca

SEQ ID NO: 22081 - RNA, 22 nt, synthetic construct
  source 1..22: mol_type = other RNA
aaactgctcaggagtcagaaga

SEQ ID NO: 22082 - RNA, 22 nt, synthetic construct
  source 1..22: mol_type = other RNA
aaactgcttttttaaaagggca

SEQ ID NO: 22083 - RNA, 22 nt, synthetic construct
  source 1..22: mol_type = other RNA
aaactgttacaggagctacata

SEQ ID NO: 22084 - RNA, 22 nt, synthetic construct
  source 1..22: mol_type = other RNA
aaacttgtaggacagaaattta

SEQ ID NO: 22085 - RNA, 22 nt, synthetic construct
  source 1..22: mol_type = other RNA
aaagaaccaccccacaaagata

SEQ ID NO: 22086 - RNA, 22 nt, synthetic construct
  source 1..22: mol_type = other RNA
aaagacagagacagcaatttgg

SEQ ID NO: 22087 - RNA, 22 nt, synthetic construct
  source 1..22: mol_type = other RNA
aaagacatttacatgtcgctca

SEQ ID NO: 22088 - RNA, 22 nt, synthetic construct
  source 1..22: mol_type = other RNA
aaagagaaaaccatcaatgtcc

SEQ ID NO: 22089 - RNA, 22 nt, synthetic construct
  source 1..22: mol_type = other RNA
aaagataacactaaagacagag

SEQ ID NO: 22090 - RNA, 22 nt, synthetic construct
  source 1..22: mol_type = other RNA
aaagatatatgacgtctctatg

SEQ ID NO: 22091 - RNA, 22 nt, synthetic construct
  source 1..22: mol_type = other RNA
aaagatgtgcctgccttggaca

SEQ ID NO: 22092 - RNA, 22 nt, synthetic construct
  source 1..22: mol_type = other RNA
aaagattggacacccctggttt

SEQ ID NO: 22093 - RNA, 22 nt, synthetic construct
  source 1..22: mol_type = other RNA
aaagcaagcgttaatgagtttg

SEQ ID NO: 22094 - RNA, 22 nt, synthetic construct
  source 1..22: mol_type = other RNA
aaagcactgctgggtaagagtc

SEQ ID NO: 22095 - RNA, 22 nt, synthetic construct
  source 1..22: mol_type = other RNA
aaagcagcaagggtagcattcc

SEQ ID NO: 22096 - RNA, 22 nt, synthetic construct
  source 1..22: mol_type = other RNA
aaagcagtagtcaagatcacct

SEQ ID NO: 22097 - RNA, 22 nt, synthetic construct
  source 1..22: mol_type = other RNA
aaagcagttttcttctgactcc

SEQ ID NO: 22098 - RNA, 22 nt, synthetic construct
  source 1..22: mol_type = other RNA
aaagcatgatcacctgagtttt

SEQ ID NO: 22099 - RNA, 22 nt, synthetic construct
  source 1..22: mol_type = other RNA
aaagcatttggtgttaaaatgt

SEQ ID NO: 22100 - RNA, 22 nt, synthetic construct
  source 1..22: mol_type = other RNA
aaagctaagtccaacaaaccat

SEQ ID NO: 22101 - RNA, 22 nt, synthetic construct
  source 1..22: mol_type = other RNA
aaagctagtgctatgtctgaat

SEQ ID NO: 22102 - RNA, 22 nt, synthetic construct
  source 1..22: mol_type = other RNA
aaagctgaagctctctggccca

SEQ ID NO: 22103 - RNA, 22 nt, synthetic construct
  source 1..22: mol_type = other RNA
aaagctgtcctgggtcccatgc

SEQ ID NO: 22104 - RNA, 22 nt, synthetic construct
  source 1..22: mol_type = other RNA
aaagctgttaaattgaggaaag

SEQ ID NO: 22105 - RNA, 22 nt, synthetic construct
  source 1..22: mol_type = other RNA
aaaggaagatagagcatgaaaa

SEQ ID NO: 22106 - RNA, 22 nt, synthetic construct
  source 1..22: mol_type = other RNA
aaagggagatgttgcctaacct

SEQ ID NO: 22107 - RNA, 22 nt, synthetic construct
  source 1..22: mol_type = other RNA
aaagggcagtttgggtcataga

SEQ ID NO: 22108 - RNA, 22 nt, synthetic construct
  source 1..22: mol_type = other RNA
aaaggggagatgacatttgaat

SEQ ID NO: 22109 - RNA, 22 nt, synthetic construct
  source 1..22: mol_type = other RNA
aaaggggtagagagcctgggga

SEQ ID NO: 22110 - RNA, 22 nt, synthetic construct
  source 1..22: mol_type = other RNA
aaagtctatccagggaccttat

SEQ ID NO: 22111 - RNA, 22 nt, synthetic construct
  source 1..22: mol_type = other RNA
aaagtggctggtatgactaaag

SEQ ID NO: 22112 - RNA, 22 nt, synthetic construct
  source 1..22: mol_type = other RNA
aaagtgtagcatcaggttaaat

SEQ ID NO: 22113 - RNA, 22 nt, synthetic construct
  source 1..22: mol_type = other RNA
aaagttggctagacatcagagt

SEQ ID NO: 22114 - RNA, 22 nt, synthetic construct
  source 1..22: mol_type = other RNA
aaataaaagctgaagctctctg

SEQ ID NO: 22115 - RNA, 22 nt, synthetic construct
  source 1..22: mol_type = other RNA
aaatacctctcatttctgttct

SEQ ID NO: 22116 - RNA, 22 nt, synthetic construct
  source 1..22: mol_type = other RNA
aaatatatcagaacttgaatga

SEQ ID NO: 22117 - RNA, 22 nt, synthetic construct
  source 1..22: mol_type = other RNA
aaatatgacctctctcctgaag

SEQ ID NO: 22118 - RNA, 22 nt, synthetic construct
  source 1..22: mol_type = other RNA
aaatcaagataaacatttaaga

SEQ ID NO: 22119 - RNA, 22 nt, synthetic construct
  source 1..22: mol_type = other RNA
aaatcagcaatgacaacaaccc

SEQ ID NO: 22120 - RNA, 22 nt, synthetic construct
  source 1..22: mol_type = other RNA
aaatcatagagacgtcatatat

SEQ ID NO: 22121 - RNA, 22 nt, synthetic construct
  source 1..22: mol_type = other RNA
aaatccaaactcattaacgctt

SEQ ID NO: 22122 - RNA, 22 nt, synthetic construct
  source 1..22: mol_type = other RNA
aaatgaaaaagctgttaaattg

SEQ ID NO: 22123 - RNA, 22 nt, synthetic construct
  source 1..22: mol_type = other RNA
aaatgaaatgtaatgggccaga

SEQ ID NO: 22124 - RNA, 22 nt, synthetic construct
  source 1..22: mol_type = other RNA
aaatgaacccagcctaaatttc

SEQ ID NO: 22125 - RNA, 22 nt, synthetic construct
  source 1..22: mol_type = other RNA
aaatgacaggtgaaactccatt

SEQ ID NO: 22126 - RNA, 22 nt, synthetic construct
  source 1..22: mol_type = other RNA
aaatgagaggtatttagaggaa

SEQ ID NO: 22127 - RNA, 22 nt, synthetic construct
  source 1..22: mol_type = other RNA
aaatgataagtagtgataatcc

SEQ ID NO: 22128 - RNA, 22 nt, synthetic construct
  source 1..22: mol_type = other RNA
aaatgcataatgaattttaggg

SEQ ID NO: 22129 - RNA, 22 nt, synthetic construct
  source 1..22: mol_type = other RNA
aaatgctccaaaaatgataagt

SEQ ID NO: 22130 - RNA, 22 nt, synthetic construct
  source 1..22: mol_type = other RNA
aaatggaaaatgggatcaagta

SEQ ID NO: 22131 - RNA, 22 nt, synthetic construct
  source 1..22: mol_type = other RNA
aaatggagtgagcgacatgtaa

SEQ ID NO: 22132 - RNA, 22 nt, synthetic construct
  source 1..22: mol_type = other RNA
aaatgggatcaagtatgagtga

SEQ ID NO: 22133 - RNA, 22 nt, synthetic construct
  source 1..22: mol_type = other RNA
aaatggtataaaactcaggtga

SEQ ID NO: 22134 - RNA, 22 nt, synthetic construct
  source 1..22: mol_type = other RNA
aaatggtttgttggacttagct

SEQ ID NO: 22135 - RNA, 22 nt, synthetic construct
  source 1..22: mol_type = other RNA
aaatgtaatgggccagagagct

SEQ ID NO: 22136 - RNA, 22 nt, synthetic construct
  source 1..22: mol_type = other RNA
aaatgtcaaaccataaagacat

SEQ ID NO: 22137 - RNA, 22 nt, synthetic construct
  source 1..22: mol_type = other RNA
aaatgtcatctcccctttggtc

SEQ ID NO: 22138 - RNA, 22 nt, synthetic construct
  source 1..22: mol_type = other RNA
aaatgttggtattataattcct

SEQ ID NO: 22139 - RNA, 22 nt, synthetic construct
  source 1..22: mol_type = other RNA
aaattaaggcttgagctggggc

SEQ ID NO: 22140 - RNA, 22 nt, synthetic construct
  source 1..22: mol_type = other RNA
aaattaccttaactattctgag

SEQ ID NO: 22141 - RNA, 22 nt, synthetic construct
  source 1..22: mol_type = other RNA
aaattcagttctttagtcatac

SEQ ID NO: 22142 - RNA, 22 nt, synthetic construct
  source 1..22: mol_type = other RNA
aaattgaggaaagtctatccag

SEQ ID NO: 22143 - RNA, 22 nt, synthetic construct
  source 1..22: mol_type = other RNA
aaattgctgtctctgtctttag

SEQ ID NO: 22144 - RNA, 22 nt, synthetic construct
  source 1..22: mol_type = other RNA
aaatttaggctgggttcatttg

SEQ ID NO: 22145 - RNA, 22 nt, synthetic construct
  source 1..22: mol_type = other RNA
aaatttctgtcctacaagtttt

SEQ ID NO: 22146 - RNA, 22 nt, synthetic construct
  source 1..22: mol_type = other RNA
aaattttagcttttgcttgaga

SEQ ID NO: 22147 - RNA, 22 nt, synthetic construct
  source 1..22: mol_type = other RNA
aacaaaccatttttaaagatgt

SEQ ID NO: 22148 - RNA, 22 nt, synthetic construct
  source 1..22: mol_type = other RNA
aacaaatggaaaatgggatcaa

SEQ ID NO: 22149 - RNA, 22 nt, synthetic construct
  source 1..22: mol_type = other RNA
aacaacagaccatggaaggcat

SEQ ID NO: 22150 - RNA, 22 nt, synthetic construct
  source 1..22: mol_type = other RNA
aacaaccccagaattactatga

SEQ ID NO: 22151 - RNA, 22 nt, synthetic construct
  source 1..22: mol_type = other RNA
aacaagatgtaagatggatcaa

SEQ ID NO: 22152 - RNA, 22 nt, synthetic construct
  source 1..22: mol_type = other RNA
aacaagcagttaaatgaaatgt

SEQ ID NO: 22153 - RNA, 22 nt, synthetic construct
  source 1..22: mol_type = other RNA
aacaagtccggggctacagcta

SEQ ID NO: 22154 - RNA, 22 nt, synthetic construct
  source 1..22: mol_type = other RNA
aacaatcacaaagtaagtttta

SEQ ID NO: 22155 - RNA, 22 nt, synthetic construct
  source 1..22: mol_type = other RNA
aacaccaaatgctttttatatt

SEQ ID NO: 22156 - RNA, 22 nt, synthetic construct
  source 1..22: mol_type = other RNA
aacactaaagacagagacagca

SEQ ID NO: 22157 - RNA, 22 nt, synthetic construct
  source 1..22: mol_type = other RNA
aacacttgattggaggagctct

SEQ ID NO: 22158 - RNA, 22 nt, synthetic construct
  source 1..22: mol_type = other RNA
aacagaaatgagaggtatttag

SEQ ID NO: 22159 - RNA, 22 nt, synthetic construct
  source 1..22: mol_type = other RNA
aacagaattcatcctgtaaacc

SEQ ID NO: 22160 - RNA, 22 nt, synthetic construct
  source 1..22: mol_type = other RNA
aacagaccatggaaggcatgac

SEQ ID NO: 22161 - RNA, 22 nt, synthetic construct
  source 1..22: mol_type = other RNA
aacagctttttcatttttcact

SEQ ID NO: 22162 - RNA, 22 nt, synthetic construct
  source 1..22: mol_type = other RNA
aacagtacaagccagtaatgga

SEQ ID NO: 22163 - RNA, 22 nt, synthetic construct
  source 1..22: mol_type = other RNA
aacagtgaaagcaagcgttaat

SEQ ID NO: 22164 - RNA, 22 nt, synthetic construct
  source 1..22: mol_type = other RNA
aacagtttaatggaatctcacc

SEQ ID NO: 22165 - RNA, 22 nt, synthetic construct
  source 1..22: mol_type = other RNA
aacatctccctttttcttcctc

SEQ ID NO: 22166 - RNA, 22 nt, synthetic construct
  source 1..22: mol_type = other RNA
aacatttaagaacgtgaactag

SEQ ID NO: 22167 - RNA, 22 nt, synthetic construct
  source 1..22: mol_type = other RNA
aaccaatctgtctggtttcgcg

SEQ ID NO: 22168 - RNA, 22 nt, synthetic construct
  source 1..22: mol_type = other RNA
aaccaccccacaaagatatatg

SEQ ID NO: 22169 - RNA, 22 nt, synthetic construct
  source 1..22: mol_type = other RNA
aaccagacagattggttccacc

SEQ ID NO: 22170 - RNA, 22 nt, synthetic construct
  source 1..22: mol_type = other RNA
aaccaggggtgtccaatctttc

SEQ ID NO: 22171 - RNA, 22 nt, synthetic construct
  source 1..22: mol_type = other RNA
aaccagtgcttccctccctcac

SEQ ID NO: 22172 - RNA, 22 nt, synthetic construct
  source 1..22: mol_type = other RNA
aaccataaagacatttacatgt

SEQ ID NO: 22173 - RNA, 22 nt, synthetic construct
  source 1..22: mol_type = other RNA
aaccatcaatgtccacgtattc

SEQ ID NO: 22174 - RNA, 22 nt, synthetic construct
  source 1..22: mol_type = other RNA
aaccatttttaaagatgtgcct

SEQ ID NO: 22175 - RNA, 22 nt, synthetic construct
  source 1..22: mol_type = other RNA
aacccagcctaaatttctgtcc

SEQ ID NO: 22176 - RNA, 22 nt, synthetic construct
  source 1..22: mol_type = other RNA
aaccccagaattactatgaccc

SEQ ID NO: 22177 - RNA, 22 nt, synthetic construct
  source 1..22: mol_type = other RNA
aacccgcgggccgcatgggacc

SEQ ID NO: 22178 - RNA, 22 nt, synthetic construct
  source 1..22: mol_type = other RNA
aacctcagatccaattctctgt

SEQ ID NO: 22179 - RNA, 22 nt, synthetic construct
  source 1..22: mol_type = other RNA
aacctgatgctacactttggtg

SEQ ID NO: 22180 - RNA, 22 nt, synthetic construct
  source 1..22: mol_type = other RNA
aacgagactgcggattatcact

SEQ ID NO: 22181 - RNA, 22 nt, synthetic construct
  source 1..22: mol_type = other RNA
aacgcttgctttcactgttgtc

SEQ ID NO: 22182 - RNA, 22 nt, synthetic construct
  source 1..22: mol_type = other RNA
aacgtgaactagggaggaataa

SEQ ID NO: 22183 - RNA, 22 nt, synthetic construct
  source 1..22: mol_type = other RNA
aactagggaggaataaaagcac

SEQ ID NO: 22184 - RNA, 22 nt, synthetic construct
  source 1..22: mol_type = other RNA
aactatgtagctcctgtaacag

SEQ ID NO: 22185 - RNA, 22 nt, synthetic construct
  source 1..22: mol_type = other RNA
aactattctgagctttttgaag

SEQ ID NO: 22186 - RNA, 22 nt, synthetic construct
  source 1..22: mol_type = other RNA
aactcaagatatgatgcttaga

SEQ ID NO: 22187 - RNA, 22 nt, synthetic construct
  source 1..22: mol_type = other RNA
aactcaggtgatcatgctttat

SEQ ID NO: 22188 - RNA, 22 nt, synthetic construct
  source 1..22: mol_type = other RNA
aactcattaacgcttgctttca

SEQ ID NO: 22189 - RNA, 22 nt, synthetic construct
  source 1..22: mol_type = other RNA
aactccattactggcttgtact

SEQ ID NO: 22190 - RNA, 22 nt, synthetic construct
  source 1..22: mol_type = other RNA
aactcctaaaactttaagaaag

SEQ ID NO: 22191 - RNA, 22 nt, synthetic construct
  source 1..22: mol_type = other RNA
aactctcactcatacttgatcc

SEQ ID NO: 22192 - RNA, 22 nt, synthetic construct
  source 1..22: mol_type = other RNA
aactgatctcagatgcctgtgt

SEQ ID NO: 22193 - RNA, 22 nt, synthetic construct
  source 1..22: mol_type = other RNA
aactgcaattcattccatgtga

SEQ ID NO: 22194 - RNA, 22 nt, synthetic construct
  source 1..22: mol_type = other RNA
aactgcccttttaaaaaagcag

SEQ ID NO: 22195 - RNA, 22 nt, synthetic construct
  source 1..22: mol_type = other RNA
aactgctcaggagtcagaagaa

SEQ ID NO: 22196 - RNA, 22 nt, synthetic construct
  source 1..22: mol_type = other RNA
aactgcttttttaaaagggcag

SEQ ID NO: 22197 - RNA, 22 nt, synthetic construct
  source 1..22: mol_type = other RNA
aactggtaagaacagaaatgag

SEQ ID NO: 22198 - RNA, 22 nt, synthetic construct
  source 1..22: mol_type = other RNA
aactgtcttgggccacatataa

SEQ ID NO: 22199 - RNA, 22 nt, synthetic construct
  source 1..22: mol_type = other RNA
aactgtggacagtatagctgta

SEQ ID NO: 22200 - RNA, 22 nt, synthetic construct
  source 1..22: mol_type = other RNA
aactgttacaggagctacatag

SEQ ID NO: 22201 - RNA, 22 nt, synthetic construct
  source 1..22: mol_type = other RNA
aacttactttgtgattgttttc

SEQ ID NO: 22202 - RNA, 22 nt, synthetic construct
  source 1..22: mol_type = other RNA
aacttgaatgaagaataggtct

SEQ ID NO: 22203 - RNA, 22 nt, synthetic construct
  source 1..22: mol_type = other RNA
aacttgctgtaaacagtacaag

SEQ ID NO: 22204 - RNA, 22 nt, synthetic construct
  source 1..22: mol_type = other RNA
aacttgtaggacagaaatttag

SEQ ID NO: 22205 - RNA, 22 nt, synthetic construct
  source 1..22: mol_type = other RNA
aactttaagaaagtttacgaat

SEQ ID NO: 22206 - RNA, 22 nt, synthetic construct
  source 1..22: mol_type = other RNA
aactttaagtaaatggagtgag

SEQ ID NO: 22207 - RNA, 22 nt, synthetic construct
  source 1..22: mol_type = other RNA
aagaaaaagggagatgttgcct

SEQ ID NO: 22208 - RNA, 22 nt, synthetic construct
  source 1..22: mol_type = other RNA
aagaaaactgcttttttaaaag

SEQ ID NO: 22209 - RNA, 22 nt, synthetic construct
  source 1..22: mol_type = other RNA
aagaacagaaatgagaggtatt

SEQ ID NO: 22210 - RNA, 22 nt, synthetic construct
  source 1..22: mol_type = other RNA
aagaaccaccccacaaagatat

SEQ ID NO: 22211 - RNA, 22 nt, synthetic construct
  source 1..22: mol_type = other RNA
aagaacgtgaactagggaggaa

SEQ ID NO: 22212 - RNA, 22 nt, synthetic construct
  source 1..22: mol_type = other RNA
aagaactgtcttgggccacata

SEQ ID NO: 22213 - RNA, 22 nt, synthetic construct
  source 1..22: mol_type = other RNA
aagaataggtctgtgtgataca

SEQ ID NO: 22214 - RNA, 22 nt, synthetic construct
  source 1..22: mol_type = other RNA
aagacactattccttcaaaaag

SEQ ID NO: 22215 - RNA, 22 nt, synthetic construct
  source 1..22: mol_type = other RNA
aagacagagacagcaatttgga

SEQ ID NO: 22216 - RNA, 22 nt, synthetic construct
  source 1..22: mol_type = other RNA
aagacagttcttgcagtgtggc

SEQ ID NO: 22217 - RNA, 22 nt, synthetic construct
  source 1..22: mol_type = other RNA
aagacatttacatgtcgctcac

SEQ ID NO: 22218 - RNA, 22 nt, synthetic construct
  source 1..22: mol_type = other RNA
aagacggtcagggacagaatcc

SEQ ID NO: 22219 - RNA, 22 nt, synthetic construct
  source 1..22: mol_type = other RNA
aagagaaaaccatcaatgtcca

SEQ ID NO: 22220 - RNA, 22 nt, synthetic construct
  source 1..22: mol_type = other RNA
aagagagggagaaagctagtgc

SEQ ID NO: 22221 - RNA, 22 nt, synthetic construct
  source 1..22: mol_type = other RNA
aagagtcaagccccagctcaag

SEQ ID NO: 22222 - RNA, 22 nt, synthetic construct
  source 1..22: mol_type = other RNA
aagataaacatttaagaacgtg

SEQ ID NO: 22223 - RNA, 22 nt, synthetic construct
  source 1..22: mol_type = other RNA
aagataacactaaagacagaga

SEQ ID NO: 22224 - RNA, 22 nt, synthetic construct
  source 1..22: mol_type = other RNA
aagatagagcatgaaaatgaca

SEQ ID NO: 22225 - RNA, 22 nt, synthetic construct
  source 1..22: mol_type = other RNA
aagatatatgacgtctctatga

SEQ ID NO: 22226 - RNA, 22 nt, synthetic construct
  source 1..22: mol_type = other RNA
aagatatgatgcttagagctcc

SEQ ID NO: 22227 - RNA, 22 nt, synthetic construct
  source 1..22: mol_type = other RNA
aagatcaagagagggagaaagc

SEQ ID NO: 22228 - RNA, 22 nt, synthetic construct
  source 1..22: mol_type = other RNA
aagatcacctggactgtgaaga

SEQ ID NO: 22229 - RNA, 22 nt, synthetic construct
  source 1..22: mol_type = other RNA
aagatgcctggtagggatgcaa

SEQ ID NO: 22230 - RNA, 22 nt, synthetic construct
  source 1..22: mol_type = other RNA
aagatggatcaaaagataacac

SEQ ID NO: 22231 - RNA, 22 nt, synthetic construct
  source 1..22: mol_type = other RNA
aagatgtaagatggatcaaaag

SEQ ID NO: 22232 - RNA, 22 nt, synthetic construct
  source 1..22: mol_type = other RNA
aagatgtgcctgccttggacaa

SEQ ID NO: 22233 - RNA, 22 nt, synthetic construct
  source 1..22: mol_type = other RNA
aagattggacacccctggttta

SEQ ID NO: 22234 - RNA, 22 nt, synthetic construct
  source 1..22: mol_type = other RNA
aagatttaacctgatgctacac

SEQ ID NO: 22235 - RNA, 22 nt, synthetic construct
  source 1..22: mol_type = other RNA
aagcaagcgttaatgagtttgg

SEQ ID NO: 22236 - RNA, 22 nt, synthetic construct
  source 1..22: mol_type = other RNA
aagcactgctgggtaagagtca

SEQ ID NO: 22237 - RNA, 22 nt, synthetic construct
  source 1..22: mol_type = other RNA
aagcactggtttctcaagcaaa

SEQ ID NO: 22238 - RNA, 22 nt, synthetic construct
  source 1..22: mol_type = other RNA
aagcagcaagggtagcattcca

SEQ ID NO: 22239 - RNA, 22 nt, synthetic construct
  source 1..22: mol_type = other RNA
aagcagtagtcaagatcacctg

SEQ ID NO: 22240 - RNA, 22 nt, synthetic construct
  source 1..22: mol_type = other RNA
aagcagttaaatgaaatgtaat

SEQ ID NO: 22241 - RNA, 22 nt, synthetic construct
  source 1..22: mol_type = other RNA
aagcagttttcttctgactcct

SEQ ID NO: 22242 - RNA, 22 nt, synthetic construct
  source 1..22: mol_type = other RNA
aagcatcatatcttgagttata

SEQ ID NO: 22243 - RNA, 22 nt, synthetic construct
  source 1..22: mol_type = other RNA
aagcatgatcacctgagtttta

SEQ ID NO: 22244 - RNA, 22 nt, synthetic construct
  source 1..22: mol_type = other RNA
aagcatttggtgttaaaatgtt

SEQ ID NO: 22245 - RNA, 22 nt, synthetic construct
  source 1..22: mol_type = other RNA
aagccagtaatggagtttcacc

SEQ ID NO: 22246 - RNA, 22 nt, synthetic construct
  source 1..22: mol_type = other RNA
aagccccagctcaagccttaat

SEQ ID NO: 22247 - RNA, 22 nt, synthetic construct
  source 1..22: mol_type = other RNA
aagccgaaagattggacacccc

SEQ ID NO: 22248 - RNA, 22 nt, synthetic construct
  source 1..22: mol_type = other RNA
aagccttaatttgtggtggaac

SEQ ID NO: 22249 - RNA, 22 nt, synthetic construct
  source 1..22: mol_type = other RNA
aagctaagtccaacaaaccatt

SEQ ID NO: 22250 - RNA, 22 nt, synthetic construct
  source 1..22: mol_type = other RNA
aagctagtgctatgtctgaata

SEQ ID NO: 22251 - RNA, 22 nt, synthetic construct
  source 1..22: mol_type = other RNA
aagctatcacacaggcatctga

SEQ ID NO: 22252 - RNA, 22 nt, synthetic construct
  source 1..22: mol_type = other RNA
aagctcagaatagttaaggtaa

SEQ ID NO: 22253 - RNA, 22 nt, synthetic construct
  source 1..22: mol_type = other RNA
aagctctctggcccattacatt

SEQ ID NO: 22254 - RNA, 22 nt, synthetic construct
  source 1..22: mol_type = other RNA
aagctgaagctctctggcccat

SEQ ID NO: 22255 - RNA, 22 nt, synthetic construct
  source 1..22: mol_type = other RNA
aagctgtcctgggtcccatgcg

SEQ ID NO: 22256 - RNA, 22 nt, synthetic construct
  source 1..22: mol_type = other RNA
aagctgttaaattgaggaaagt

SEQ ID NO: 22257 - RNA, 22 nt, synthetic construct
  source 1..22: mol_type = other RNA
aaggaaataaaagctgaagctc

SEQ ID NO: 22258 - RNA, 22 nt, synthetic construct
  source 1..22: mol_type = other RNA
aaggaagatagagcatgaaaat

SEQ ID NO: 22259 - RNA, 22 nt, synthetic construct
  source 1..22: mol_type = other RNA
aaggaatagtgtcttgtactcc

SEQ ID NO: 22260 - RNA, 22 nt, synthetic construct
  source 1..22: mol_type = other RNA
aaggcaggcacatctttaaaaa

SEQ ID NO: 22261 - RNA, 22 nt, synthetic construct
  source 1..22: mol_type = other RNA
aaggcatgaccaaaggggagat

SEQ ID NO: 22262 - RNA, 22 nt, synthetic construct
  source 1..22: mol_type = other RNA
aaggcttgagctggggcttgac

SEQ ID NO: 22263 - RNA, 22 nt, synthetic construct
  source 1..22: mol_type = other RNA
aagggagatgttgcctaacctc

SEQ ID NO: 22264 - RNA, 22 nt, synthetic construct
  source 1..22: mol_type = other RNA
aagggcagtttgggtcatagaa

SEQ ID NO: 22265 - RNA, 22 nt, synthetic construct
  source 1..22: mol_type = other RNA
aaggggagatgacatttgaatc

SEQ ID NO: 22266 - RNA, 22 nt, synthetic construct
  source 1..22: mol_type = other RNA
aaggggtagagagcctggggag

SEQ ID NO: 22267 - RNA, 22 nt, synthetic construct
  source 1..22: mol_type = other RNA
aagggtagcattccaaaaagaa

SEQ ID NO: 22268 - RNA, 22 nt, synthetic construct
  source 1..22: mol_type = other RNA
aagggtctcaaatggtataaaa

SEQ ID NO: 22269 - RNA, 22 nt, synthetic construct
  source 1..22: mol_type = other RNA
aaggtaatttaaatcagcaatg

SEQ ID NO: 22270 - RNA, 22 nt, synthetic construct
  source 1..22: mol_type = other RNA
aaggtccctggatagactttcc

SEQ ID NO: 22271 - RNA, 22 nt, synthetic construct
  source 1..22: mol_type = other RNA
aagtaaatggagtgagcgacat

SEQ ID NO: 22272 - RNA, 22 nt, synthetic construct
  source 1..22: mol_type = other RNA
aagtacaacaaatggaaaatgg

SEQ ID NO: 22273 - RNA, 22 nt, synthetic construct
  source 1..22: mol_type = other RNA
aagtatgagtgagagttgctaa

SEQ ID NO: 22274 - RNA, 22 nt, synthetic construct
  source 1..22: mol_type = other RNA
aagtcacatggaatgaattgca

SEQ ID NO: 22275 - RNA, 22 nt, synthetic construct
  source 1..22: mol_type = other RNA
aagtccaacaaaccatttttaa

SEQ ID NO: 22276 - RNA, 22 nt, synthetic construct
  source 1..22: mol_type = other RNA
aagtccggggctacagctatac

SEQ ID NO: 22277 - RNA, 22 nt, synthetic construct
  source 1..22: mol_type = other RNA
aagtctatccagggaccttatg

SEQ ID NO: 22278 - RNA, 22 nt, synthetic construct
  source 1..22: mol_type = other RNA
aagtgaaaacttgtaggacaga

SEQ ID NO: 22279 - RNA, 22 nt, synthetic construct
  source 1..22: mol_type = other RNA
aagtggctggtatgactaaaga

SEQ ID NO: 22280 - RNA, 22 nt, synthetic construct
  source 1..22: mol_type = other RNA
aagtgtagcatcaggttaaatc

SEQ ID NO: 22281 - RNA, 22 nt, synthetic construct
  source 1..22: mol_type = other RNA
aagtgtttccaggaagtgaaaa

SEQ ID NO: 22282 - RNA, 22 nt, synthetic construct
  source 1..22: mol_type = other RNA
aagttctgatatatttaactat

SEQ ID NO: 22283 - RNA, 22 nt, synthetic construct
  source 1..22: mol_type = other RNA
aagttggctagacatcagagta

SEQ ID NO: 22284 - RNA, 22 nt, synthetic construct
  source 1..22: mol_type = other RNA
aagttgtctaacccgcgggccg

SEQ ID NO: 22285 - RNA, 22 nt, synthetic construct
  source 1..22: mol_type = other RNA
aagttttatcctgaggaattat

SEQ ID NO: 22286 - RNA, 22 nt, synthetic construct
  source 1..22: mol_type = other RNA
aagttttcacttcctggaaaca

SEQ ID NO: 22287 - RNA, 22 nt, synthetic construct
  source 1..22: mol_type = other RNA
aataaaaattcagttctttagt

SEQ ID NO: 22288 - RNA, 22 nt, synthetic construct
  source 1..22: mol_type = other RNA
aataaaagcactgctgggtaag

SEQ ID NO: 22289 - RNA, 22 nt, synthetic construct
  source 1..22: mol_type = other RNA
aataaaagctgaagctctctgg

SEQ ID NO: 22290 - RNA, 22 nt, synthetic construct
  source 1..22: mol_type = other RNA
aataccaacattttaacaccaa

SEQ ID NO: 22291 - RNA, 22 nt, synthetic construct
  source 1..22: mol_type = other RNA
aatacctctcatttctgttctt

SEQ ID NO: 22292 - RNA, 22 nt, synthetic construct
  source 1..22: mol_type = other RNA
aatacgtggacattgatggttt

SEQ ID NO: 22293 - RNA, 22 nt, synthetic construct
  source 1..22: mol_type = other RNA
aatactagaggagcaagtacaa

SEQ ID NO: 22294 - RNA, 22 nt, synthetic construct
  source 1..22: mol_type = other RNA
aataggtctgtgtgatacaaat

SEQ ID NO: 22295 - RNA, 22 nt, synthetic construct
  source 1..22: mol_type = other RNA
aatagtgtcttgtactcctgag

SEQ ID NO: 22296 - RNA, 22 nt, synthetic construct
  source 1..22: mol_type = other RNA
aatatatcagaacttgaatgaa

SEQ ID NO: 22297 - RNA, 22 nt, synthetic construct
  source 1..22: mol_type = other RNA
aatatgacctctctcctgaagt

SEQ ID NO: 22298 - RNA, 22 nt, synthetic construct
  source 1..22: mol_type = other RNA
aatcaagataaacatttaagaa

SEQ ID NO: 22299 - RNA, 22 nt, synthetic construct
  source 1..22: mol_type = other RNA
aatcaagtgtttccaggaagtg

SEQ ID NO: 22300 - RNA, 22 nt, synthetic construct
  source 1..22: mol_type = other RNA
aatcacaaagtaagttttatcc

SEQ ID NO: 22301 - RNA, 22 nt, synthetic construct
  source 1..22: mol_type = other RNA
aatcagcaatgacaacaacccc

SEQ ID NO: 22302 - RNA, 22 nt, synthetic construct
  source 1..22: mol_type = other RNA
aatcatagagacgtcatatatc

SEQ ID NO: 22303 - RNA, 22 nt, synthetic construct
  source 1..22: mol_type = other RNA
aatcatcctaacaagatgtaag

SEQ ID NO: 22304 - RNA, 22 nt, synthetic construct
  source 1..22: mol_type = other RNA
aatccaaactcattaacgcttg

SEQ ID NO: 22305 - RNA, 22 nt, synthetic construct
  source 1..22: mol_type = other RNA
aatccacagaacaagtccgggg

SEQ ID NO: 22306 - RNA, 22 nt, synthetic construct
  source 1..22: mol_type = other RNA
aatcccagctaaggaaaaagga

SEQ ID NO: 22307 - RNA, 22 nt, synthetic construct
  source 1..22: mol_type = other RNA
aatcctgcagattcaaatgtca

SEQ ID NO: 22308 - RNA, 22 nt, synthetic construct
  source 1..22: mol_type = other RNA
aatctcacctccctaaaattca

SEQ ID NO: 22309 - RNA, 22 nt, synthetic construct
  source 1..22: mol_type = other RNA
aatctgcaggattaaaagcagc

SEQ ID NO: 22310 - RNA, 22 nt, synthetic construct
  source 1..22: mol_type = other RNA
aatctgtctggtttcgcgagac

SEQ ID NO: 22311 - RNA, 22 nt, synthetic construct
  source 1..22: mol_type = other RNA
aatcttgagcattggaaaagtg

SEQ ID NO: 22312 - RNA, 22 nt, synthetic construct
  source 1..22: mol_type = other RNA
aatctttcggcttccctgggcc

SEQ ID NO: 22313 - RNA, 22 nt, synthetic construct
  source 1..22: mol_type = other RNA
aatgaaaaagctgttaaattga

SEQ ID NO: 22314 - RNA, 22 nt, synthetic construct
  source 1..22: mol_type = other RNA
aatgaaatgtaatgggccagag

SEQ ID NO: 22315 - RNA, 22 nt, synthetic construct
  source 1..22: mol_type = other RNA
aatgaacccagcctaaatttct

SEQ ID NO: 22316 - RNA, 22 nt, synthetic construct
  source 1..22: mol_type = other RNA
aatgaagaataggtctgtgtga

SEQ ID NO: 22317 - RNA, 22 nt, synthetic construct
  source 1..22: mol_type = other RNA
aatgaattgcagttacccaaat

SEQ ID NO: 22318 - RNA, 22 nt, synthetic construct
  source 1..22: mol_type = other RNA
aatgaattttagggaggtgaga

SEQ ID NO: 22319 - RNA, 22 nt, synthetic construct
  source 1..22: mol_type = other RNA
aatgacaacaaccccagaatta

SEQ ID NO: 22320 - RNA, 22 nt, synthetic construct
  source 1..22: mol_type = other RNA
aatgacaggtgaaactccatta

SEQ ID NO: 22321 - RNA, 22 nt, synthetic construct
  source 1..22: mol_type = other RNA
aatgagaggtatttagaggaag

SEQ ID NO: 22322 - RNA, 22 nt, synthetic construct
  source 1..22: mol_type = other RNA
aatgataagtagtgataatccg

SEQ ID NO: 22323 - RNA, 22 nt, synthetic construct
  source 1..22: mol_type = other RNA
aatgcataatgaattttaggga

SEQ ID NO: 22324 - RNA, 22 nt, synthetic construct
  source 1..22: mol_type = other RNA
aatgctacccttgctgctttta

SEQ ID NO: 22325 - RNA, 22 nt, synthetic construct
  source 1..22: mol_type = other RNA
aatgctcaagattaataaaatg

SEQ ID NO: 22326 - RNA, 22 nt, synthetic construct
  source 1..22: mol_type = other RNA
aatgctccaaaaatgataagta

SEQ ID NO: 22327 - RNA, 22 nt, synthetic construct
  source 1..22: mol_type = other RNA
aatggaaaatgggatcaagtat

SEQ ID NO: 22328 - RNA, 22 nt, synthetic construct
  source 1..22: mol_type = other RNA
aatggaatctcacctccctaaa

SEQ ID NO: 22329 - RNA, 22 nt, synthetic construct
  source 1..22: mol_type = other RNA
aatggagtgagcgacatgtaaa

SEQ ID NO: 22330 - RNA, 22 nt, synthetic construct
  source 1..22: mol_type = other RNA
aatggagtttcacctgtcattt

SEQ ID NO: 22331 - RNA, 22 nt, synthetic construct
  source 1..22: mol_type = other RNA
aatgggatcaagtatgagtgag

SEQ ID NO: 22332 - RNA, 22 nt, synthetic construct
  source 1..22: mol_type = other RNA
aatgggccagagagcttcagct

SEQ ID NO: 22333 - RNA, 22 nt, synthetic construct
  source 1..22: mol_type = other RNA
aatggtataaaactcaggtgat

SEQ ID NO: 22334 - RNA, 22 nt, synthetic construct
  source 1..22: mol_type = other RNA
aatggtttgttggacttagctt

SEQ ID NO: 22335 - RNA, 22 nt, synthetic construct
  source 1..22: mol_type = other RNA
aatgtaatgggccagagagctt

SEQ ID NO: 22336 - RNA, 22 nt, synthetic construct
  source 1..22: mol_type = other RNA
aatgtcaaaccataaagacatt

SEQ ID NO: 22337 - RNA, 22 nt, synthetic construct
  source 1..22: mol_type = other RNA
aatgtcatctcccctttggtca

SEQ ID NO: 22338 - RNA, 22 nt, synthetic construct
  source 1..22: mol_type = other RNA
aatgtccacgtattctgtaatc

SEQ ID NO: 22339 - RNA, 22 nt, synthetic construct
  source 1..22: mol_type = other RNA
aatgtgatgcataaggtccctg

SEQ ID NO: 22340 - RNA, 22 nt, synthetic construct
  source 1..22: mol_type = other RNA
aatgttggtattataattcctc

SEQ ID NO: 22341 - RNA, 22 nt, synthetic construct
  source 1..22: mol_type = other RNA
aattaaggcttgagctggggct

SEQ ID NO: 22342 - RNA, 22 nt, synthetic construct
  source 1..22: mol_type = other RNA
aattaccttaactattctgagc

SEQ ID NO: 22343 - RNA, 22 nt, synthetic construct
  source 1..22: mol_type = other RNA
aattactatgacccacgcagta

SEQ ID NO: 22344 - RNA, 22 nt, synthetic construct
  source 1..22: mol_type = other RNA
aattcagttctttagtcatacc

SEQ ID NO: 22345 - RNA, 22 nt, synthetic construct
  source 1..22: mol_type = other RNA
aattcatcctgtaaaccagggg

SEQ ID NO: 22346 - RNA, 22 nt, synthetic construct
  source 1..22: mol_type = other RNA
aattcattccatgtgacttcag

SEQ ID NO: 22347 - RNA, 22 nt, synthetic construct
  source 1..22: mol_type = other RNA
aattcctcaggataaaacttac

SEQ ID NO: 22348 - RNA, 22 nt, synthetic construct
  source 1..22: mol_type = other RNA
aattcgtaaactttcttaaagt

SEQ ID NO: 22349 - RNA, 22 nt, synthetic construct
  source 1..22: mol_type = other RNA
aattctctgtaaagcagtagtc

SEQ ID NO: 22350 - RNA, 22 nt, synthetic construct
  source 1..22: mol_type = other RNA
aattctggggttgttgtcattg

SEQ ID NO: 22351 - RNA, 22 nt, synthetic construct
  source 1..22: mol_type = other RNA
aattctgttctcgtgaatgtga

SEQ ID NO: 22352 - RNA, 22 nt, synthetic construct
  source 1..22: mol_type = other RNA
aattgaggaaagtctatccagg

SEQ ID NO: 22353 - RNA, 22 nt, synthetic construct
  source 1..22: mol_type = other RNA
aattgcaactgtggacagtata

SEQ ID NO: 22354 - RNA, 22 nt, synthetic construct
  source 1..22: mol_type = other RNA
aattgcagttacccaaatcata

SEQ ID NO: 22355 - RNA, 22 nt, synthetic construct
  source 1..22: mol_type = other RNA
aattgctgtctctgtctttagt

SEQ ID NO: 22356 - RNA, 22 nt, synthetic construct
  source 1..22: mol_type = other RNA
aattggatctgaggttaggcaa

SEQ ID NO: 22357 - RNA, 22 nt, synthetic construct
  source 1..22: mol_type = other RNA
aatttaaatcagcaatgacaac

SEQ ID NO: 22358 - RNA, 22 nt, synthetic construct
  source 1..22: mol_type = other RNA
aatttaggctgggttcatttgt

SEQ ID NO: 22359 - RNA, 22 nt, synthetic construct
  source 1..22: mol_type = other RNA
aatttctgtcctacaagttttc

SEQ ID NO: 22360 - RNA, 22 nt, synthetic construct
  source 1..22: mol_type = other RNA
aatttgaattgcaactgtggac

SEQ ID NO: 22361 - RNA, 22 nt, synthetic construct
  source 1..22: mol_type = other RNA
aatttggaagctatcacacagg

SEQ ID NO: 22362 - RNA, 22 nt, synthetic construct
  source 1..22: mol_type = other RNA
aatttgtggtggaaccaatctg

SEQ ID NO: 22363 - RNA, 22 nt, synthetic construct
  source 1..22: mol_type = other RNA
aattttagcttttgcttgagaa

SEQ ID NO: 22364 - RNA, 22 nt, synthetic construct
  source 1..22: mol_type = other RNA
aattttagggaggtgagattcc

SEQ ID NO: 22365 - RNA, 22 nt, synthetic construct
  source 1..22: mol_type = other RNA
acaaaacaagcagttaaatgaa

SEQ ID NO: 22366 - RNA, 22 nt, synthetic construct
  source 1..22: mol_type = other RNA
acaaaccatttttaaagatgtg

SEQ ID NO: 22367 - RNA, 22 nt, synthetic construct
  source 1..22: mol_type = other RNA
acaaactgctcaggagtcagaa

SEQ ID NO: 22368 - RNA, 22 nt, synthetic construct
  source 1..22: mol_type = other RNA
acaaagatatatgacgtctcta

SEQ ID NO: 22369 - RNA, 22 nt, synthetic construct
  source 1..22: mol_type = other RNA
acaaagtaagttttatcctgag

SEQ ID NO: 22370 - RNA, 22 nt, synthetic construct
  source 1..22: mol_type = other RNA
acaaatatgacctctctcctga

SEQ ID NO: 22371 - RNA, 22 nt, synthetic construct
  source 1..22: mol_type = other RNA
acaaatgaacccagcctaaatt

SEQ ID NO: 22372 - RNA, 22 nt, synthetic construct
  source 1..22: mol_type = other RNA
acaaatggaaaatgggatcaag

SEQ ID NO: 22373 - RNA, 22 nt, synthetic construct
  source 1..22: mol_type = other RNA
acaaattaaggcttgagctggg

SEQ ID NO: 22374 - RNA, 22 nt, synthetic construct
  source 1..22: mol_type = other RNA
acaacaaatggaaaatgggatc

SEQ ID NO: 22375 - RNA, 22 nt, synthetic construct
  source 1..22: mol_type = other RNA
acaacaaccccagaattactat

SEQ ID NO: 22376 - RNA, 22 nt, synthetic construct
  source 1..22: mol_type = other RNA
acaacagaccatggaaggcatg

SEQ ID NO: 22377 - RNA, 22 nt, synthetic construct
  source 1..22: mol_type = other RNA
acaacagtgaaagcaagcgtta

SEQ ID NO: 22378 - RNA, 22 nt, synthetic construct
  source 1..22: mol_type = other RNA
acaaccccagaattactatgac

SEQ ID NO: 22379 - RNA, 22 nt, synthetic construct
  source 1..22: mol_type = other RNA
acaacttgctgtaaacagtaca

SEQ ID NO: 22380 - RNA, 22 nt, synthetic construct
  source 1..22: mol_type = other RNA
acaagacactattccttcaaaa

SEQ ID NO: 22381 - RNA, 22 nt, synthetic construct
  source 1..22: mol_type = other RNA
acaagatgtaagatggatcaaa

SEQ ID NO: 22382 - RNA, 22 nt, synthetic construct
  source 1..22: mol_type = other RNA
acaagcagttaaatgaaatgta

SEQ ID NO: 22383 - RNA, 22 nt, synthetic construct
  source 1..22: mol_type = other RNA
acaagccagtaatggagtttca

SEQ ID NO: 22384 - RNA, 22 nt, synthetic construct
  source 1..22: mol_type = other RNA
acaagtccggggctacagctat

SEQ ID NO: 22385 - RNA, 22 nt, synthetic construct
  source 1..22: mol_type = other RNA
acaagttttcacttcctggaaa

SEQ ID NO: 22386 - RNA, 22 nt, synthetic construct
  source 1..22: mol_type = other RNA
acaatcacaaagtaagttttat

SEQ ID NO: 22387 - RNA, 22 nt, synthetic construct
  source 1..22: mol_type = other RNA
acaatcatcctaacaagatgta

SEQ ID NO: 22388 - RNA, 22 nt, synthetic construct
  source 1..22: mol_type = other RNA
acacaaatatgacctctctcct

SEQ ID NO: 22389 - RNA, 22 nt, synthetic construct
  source 1..22: mol_type = other RNA
acacacaaatatgacctctctc

SEQ ID NO: 22390 - RNA, 22 nt, synthetic construct
  source 1..22: mol_type = other RNA
acacacacaaatatgacctctc

SEQ ID NO: 22391 - RNA, 22 nt, synthetic construct
  source 1..22: mol_type = other RNA
acacagacctattcttcattca

SEQ ID NO: 22392 - RNA, 22 nt, synthetic construct
  source 1..22: mol_type = other RNA
acacaggcatctgagatcagtt

SEQ ID NO: 22393 - RNA, 22 nt, synthetic construct
  source 1..22: mol_type = other RNA
acaccaaatgctttttatattg

SEQ ID NO: 22394 - RNA, 22 nt, synthetic construct
  source 1..22: mol_type = other RNA
acaccaggctacccaagatcaa

SEQ ID NO: 22395 - RNA, 22 nt, synthetic construct
  source 1..22: mol_type = other RNA
acacccctggtttacaggatga

SEQ ID NO: 22396 - RNA, 22 nt, synthetic construct
  source 1..22: mol_type = other RNA
acactaaagacagagacagcaa

SEQ ID NO: 22397 - RNA, 22 nt, synthetic construct
  source 1..22: mol_type = other RNA
acactattccttcaaaaagctc

SEQ ID NO: 22398 - RNA, 22 nt, synthetic construct
  source 1..22: mol_type = other RNA
acactgcaagaactgtcttggg

SEQ ID NO: 22399 - RNA, 22 nt, synthetic construct
  source 1..22: mol_type = other RNA
acacttgattggaggagctcta

SEQ ID NO: 22400 - RNA, 22 nt, synthetic construct
  source 1..22: mol_type = other RNA
acactttggtggtgcagcaagg

SEQ ID NO: 22401 - RNA, 22 nt, synthetic construct
  source 1..22: mol_type = other RNA
acagaaatgagaggtatttaga

SEQ ID NO: 22402 - RNA, 22 nt, synthetic construct
  source 1..22: mol_type = other RNA
acagaaatttaggctgggttca

SEQ ID NO: 22403 - RNA, 22 nt, synthetic construct
  source 1..22: mol_type = other RNA
acagaacaagtccggggctaca

SEQ ID NO: 22404 - RNA, 22 nt, synthetic construct
  source 1..22: mol_type = other RNA
acagaatacgtggacattgatg

SEQ ID NO: 22405 - RNA, 22 nt, synthetic construct
  source 1..22: mol_type = other RNA
acagaatcccagctaaggaaaa

SEQ ID NO: 22406 - RNA, 22 nt, synthetic construct
  source 1..22: mol_type = other RNA
acagaattcatcctgtaaacca

SEQ ID NO: 22407 - RNA, 22 nt, synthetic construct
  source 1..22: mol_type = other RNA
acagacataaagcatgatcacc

SEQ ID NO: 22408 - RNA, 22 nt, synthetic construct
  source 1..22: mol_type = other RNA
acagaccatggaaggcatgacc

SEQ ID NO: 22409 - RNA, 22 nt, synthetic construct
  source 1..22: mol_type = other RNA
acagacctattcttcattcaag

SEQ ID NO: 22410 - RNA, 22 nt, synthetic construct
  source 1..22: mol_type = other RNA
acagagaattggatctgaggtt

SEQ ID NO: 22411 - RNA, 22 nt, synthetic construct
  source 1..22: mol_type = other RNA
acagagacagcaatttggaagc

SEQ ID NO: 22412 - RNA, 22 nt, synthetic construct
  source 1..22: mol_type = other RNA
acagattggttccaccacaaat

SEQ ID NO: 22413 - RNA, 22 nt, synthetic construct
  source 1..22: mol_type = other RNA
acagcaagttgtctaacccgcg

SEQ ID NO: 22414 - RNA, 22 nt, synthetic construct
  source 1..22: mol_type = other RNA
acagcaatttggaagctatcac

SEQ ID NO: 22415 - RNA, 22 nt, synthetic construct
  source 1..22: mol_type = other RNA
acagctatactgtccacagttg

SEQ ID NO: 22416 - RNA, 22 nt, synthetic construct
  source 1..22: mol_type = other RNA
acagctttgaatgcgacccaac

SEQ ID NO: 22417 - RNA, 22 nt, synthetic construct
  source 1..22: mol_type = other RNA
acagctttttcatttttcacta

SEQ ID NO: 22418 - RNA, 22 nt, synthetic construct
  source 1..22: mol_type = other RNA
acaggagctacatagttaaata

SEQ ID NO: 22419 - RNA, 22 nt, synthetic construct
  source 1..22: mol_type = other RNA
acaggatgaattctgttctcgt

SEQ ID NO: 22420 - RNA, 22 nt, synthetic construct
  source 1..22: mol_type = other RNA
acaggcatctgagatcagttac

SEQ ID NO: 22421 - RNA, 22 nt, synthetic construct
  source 1..22: mol_type = other RNA
acaggtgaaactccattactgg

SEQ ID NO: 22422 - RNA, 22 nt, synthetic construct
  source 1..22: mol_type = other RNA
acagtacaagccagtaatggag

SEQ ID NO: 22423 - RNA, 22 nt, synthetic construct
  source 1..22: mol_type = other RNA
acagtatagctgtagccccgga

SEQ ID NO: 22424 - RNA, 22 nt, synthetic construct
  source 1..22: mol_type = other RNA
acagtccaggtgatcttgacta

SEQ ID NO: 22425 - RNA, 22 nt, synthetic construct
  source 1..22: mol_type = other RNA
acagtgaaagcaagcgttaatg

SEQ ID NO: 22426 - RNA, 22 nt, synthetic construct
  source 1..22: mol_type = other RNA
acagttcttgcagtgtggccca

SEQ ID NO: 22427 - RNA, 22 nt, synthetic construct
  source 1..22: mol_type = other RNA
acagtttaatggaatctcacct

SEQ ID NO: 22428 - RNA, 22 nt, synthetic construct
  source 1..22: mol_type = other RNA
acataaagcatgatcacctgag

SEQ ID NO: 22429 - RNA, 22 nt, synthetic construct
  source 1..22: mol_type = other RNA
acatactacacacacaaatatg

SEQ ID NO: 22430 - RNA, 22 nt, synthetic construct
  source 1..22: mol_type = other RNA
acatagcactagctttctccct

SEQ ID NO: 22431 - RNA, 22 nt, synthetic construct
  source 1..22: mol_type = other RNA
acatataaaggacagctgatga

SEQ ID NO: 22432 - RNA, 22 nt, synthetic construct
  source 1..22: mol_type = other RNA
acatcagagtatactaggagct

SEQ ID NO: 22433 - RNA, 22 nt, synthetic construct
  source 1..22: mol_type = other RNA
acatctccctttttcttcctct

SEQ ID NO: 22434 - RNA, 22 nt, synthetic construct
  source 1..22: mol_type = other RNA
acatcttgttaggatgattgtc

SEQ ID NO: 22435 - RNA, 22 nt, synthetic construct
  source 1..22: mol_type = other RNA
acatctttaaaaatggtttgtt

SEQ ID NO: 22436 - RNA, 22 nt, synthetic construct
  source 1..22: mol_type = other RNA
acatggaatgaattgcagttac

SEQ ID NO: 22437 - RNA, 22 nt, synthetic construct
  source 1..22: mol_type = other RNA
acatgtaaatgtctttatggtt

SEQ ID NO: 22438 - RNA, 22 nt, synthetic construct
  source 1..22: mol_type = other RNA
acatgtcgctcactccatttac

SEQ ID NO: 22439 - RNA, 22 nt, synthetic construct
  source 1..22: mol_type = other RNA
acattcacgagaacagaattca

SEQ ID NO: 22440 - RNA, 22 nt, synthetic construct
  source 1..22: mol_type = other RNA
acattgatggttttctcttttt

SEQ ID NO: 22441 - RNA, 22 nt, synthetic construct
  source 1..22: mol_type = other RNA
acatttaagaacgtgaactagg

SEQ ID NO: 22442 - RNA, 22 nt, synthetic construct
  source 1..22: mol_type = other RNA
acatttacatgtcgctcactcc

SEQ ID NO: 22443 - RNA, 22 nt, synthetic construct
  source 1..22: mol_type = other RNA
acatttgaatctgcaggattaa

SEQ ID NO: 22444 - RNA, 22 nt, synthetic construct
  source 1..22: mol_type = other RNA
acattttattaatcttgagcat

SEQ ID NO: 22445 - RNA, 22 nt, synthetic construct
  source 1..22: mol_type = other RNA
accaaaggggagatgacatttg

SEQ ID NO: 22446 - RNA, 22 nt, synthetic construct
  source 1..22: mol_type = other RNA
accaaagtgtagcatcaggtta

SEQ ID NO: 22447 - RNA, 22 nt, synthetic construct
  source 1..22: mol_type = other RNA
accaaatgctttttatattgct

SEQ ID NO: 22448 - RNA, 22 nt, synthetic construct
  source 1..22: mol_type = other RNA
accaacattttaacaccaaatg

SEQ ID NO: 22449 - RNA, 22 nt, synthetic construct
  source 1..22: mol_type = other RNA
accaatctgtctggtttcgcga

SEQ ID NO: 22450 - RNA, 22 nt, synthetic construct
  source 1..22: mol_type = other RNA
accacaaattaaggcttgagct

SEQ ID NO: 22451 - RNA, 22 nt, synthetic construct
  source 1..22: mol_type = other RNA
accaccaaagtgtagcatcagg

SEQ ID NO: 22452 - RNA, 22 nt, synthetic construct
  source 1..22: mol_type = other RNA
accaccccacaaagatatatga

SEQ ID NO: 22453 - RNA, 22 nt, synthetic construct
  source 1..22: mol_type = other RNA
accagacagattggttccacca

SEQ ID NO: 22454 - RNA, 22 nt, synthetic construct
  source 1..22: mol_type = other RNA
accagccacttttccaatgctc

SEQ ID NO: 22455 - RNA, 22 nt, synthetic construct
  source 1..22: mol_type = other RNA
accaggcatcttagcaactctc

SEQ ID NO: 22456 - RNA, 22 nt, synthetic construct
  source 1..22: mol_type = other RNA
accaggctacccaagatcaaga

SEQ ID NO: 22457 - RNA, 22 nt, synthetic construct
  source 1..22: mol_type = other RNA
accagtgcttccctccctcacc

SEQ ID NO: 22458 - RNA, 22 nt, synthetic construct
  source 1..22: mol_type = other RNA
accagttagtaactgatctcag

SEQ ID NO: 22459 - RNA, 22 nt, synthetic construct
  source 1..22: mol_type = other RNA
accataaagacatttacatgtc

SEQ ID NO: 22460 - RNA, 22 nt, synthetic construct
  source 1..22: mol_type = other RNA
accatcaatgtccacgtattct

SEQ ID NO: 22461 - RNA, 22 nt, synthetic construct
  source 1..22: mol_type = other RNA
accatggaaggcatgaccaaag

SEQ ID NO: 22462 - RNA, 22 nt, synthetic construct
  source 1..22: mol_type = other RNA
accatttgagacccttgctgca

SEQ ID NO: 22463 - RNA, 22 nt, synthetic construct
  source 1..22: mol_type = other RNA
accatttttaaagatgtgcctg

SEQ ID NO: 22464 - RNA, 22 nt, synthetic construct
  source 1..22: mol_type = other RNA
acccaaactgcccttttaaaaa

SEQ ID NO: 22465 - RNA, 22 nt, synthetic construct
  source 1..22: mol_type = other RNA
acccaaatcatagagacgtcat

SEQ ID NO: 22466 - RNA, 22 nt, synthetic construct
  source 1..22: mol_type = other RNA
acccaagatcaagagagggaga

SEQ ID NO: 22467 - RNA, 22 nt, synthetic construct
  source 1..22: mol_type = other RNA
acccacgcagtacaaactgctc

SEQ ID NO: 22468 - RNA, 22 nt, synthetic construct
  source 1..22: mol_type = other RNA
acccagcagtgcttttattcct

SEQ ID NO: 22469 - RNA, 22 nt, synthetic construct
  source 1..22: mol_type = other RNA
acccagcctaaatttctgtcct

SEQ ID NO: 22470 - RNA, 22 nt, synthetic construct
  source 1..22: mol_type = other RNA
acccaggacagctttgaatgcg

SEQ ID NO: 22471 - RNA, 22 nt, synthetic construct
  source 1..22: mol_type = other RNA
accccacaaagatatatgacgt

SEQ ID NO: 22472 - RNA, 22 nt, synthetic construct
  source 1..22: mol_type = other RNA
accccagaattactatgaccca

SEQ ID NO: 22473 - RNA, 22 nt, synthetic construct
  source 1..22: mol_type = other RNA
acccctggtttacaggatgaat

SEQ ID NO: 22474 - RNA, 22 nt, synthetic construct
  source 1..22: mol_type = other RNA
acccctttgcatccctaccagg

SEQ ID NO: 22475 - RNA, 22 nt, synthetic construct
  source 1..22: mol_type = other RNA
acccgcgggccgcatgggaccc

SEQ ID NO: 22476 - RNA, 22 nt, synthetic construct
  source 1..22: mol_type = other RNA
accctctctccccaggctctct

SEQ ID NO: 22477 - RNA, 22 nt, synthetic construct
  source 1..22: mol_type = other RNA
acccttgctgcaccaccaaagt

SEQ ID NO: 22478 - RNA, 22 nt, synthetic construct
  source 1..22: mol_type = other RNA
acccttgctgcttttaatcctg

SEQ ID NO: 22479 - RNA, 22 nt, synthetic construct
  source 1..22: mol_type = other RNA
accgtcttcacagtccaggtga

SEQ ID NO: 22480 - RNA, 22 nt, synthetic construct
  source 1..22: mol_type = other RNA
acctattcttcattcaagttct

SEQ ID NO: 22481 - RNA, 22 nt, synthetic construct
  source 1..22: mol_type = other RNA
acctcagatccaattctctgta

SEQ ID NO: 22482 - RNA, 22 nt, synthetic construct
  source 1..22: mol_type = other RNA
acctctcatttctgttcttacc

SEQ ID NO: 22483 - RNA, 22 nt, synthetic construct
  source 1..22: mol_type = other RNA
acctctctcctgaagtcacatg

SEQ ID NO: 22484 - RNA, 22 nt, synthetic construct
  source 1..22: mol_type = other RNA
acctgagttttataccatttga

SEQ ID NO: 22485 - RNA, 22 nt, synthetic construct
  source 1..22: mol_type = other RNA
acctgatgctacactttggtgg

SEQ ID NO: 22486 - RNA, 22 nt, synthetic construct
  source 1..22: mol_type = other RNA
acctggactgtgaagacggtca

SEQ ID NO: 22487 - RNA, 22 nt, synthetic construct
  source 1..22: mol_type = other RNA
acctgtcattttcatgctctat

SEQ ID NO: 22488 - RNA, 22 nt, synthetic construct
  source 1..22: mol_type = other RNA
accttaactattctgagctttt

SEQ ID NO: 22489 - RNA, 22 nt, synthetic construct
  source 1..22: mol_type = other RNA
accttatgcatcacattcacga

SEQ ID NO: 22490 - RNA, 22 nt, synthetic construct
  source 1..22: mol_type = other RNA
acgagaacagaattcatcctgt

SEQ ID NO: 22491 - RNA, 22 nt, synthetic construct
  source 1..22: mol_type = other RNA
acgagactgcggattatcacta

SEQ ID NO: 22492 - RNA, 22 nt, synthetic construct
  source 1..22: mol_type = other RNA
acgcagtacaaactgctcagga

SEQ ID NO: 22493 - RNA, 22 nt, synthetic construct
  source 1..22: mol_type = other RNA
acgcttgctttcactgttgtcc

SEQ ID NO: 22494 - RNA, 22 nt, synthetic construct
  source 1..22: mol_type = other RNA
acggtcagggacagaatcccag

SEQ ID NO: 22495 - RNA, 22 nt, synthetic construct
  source 1..22: mol_type = other RNA
acgtattctgtaatccacagaa

SEQ ID NO: 22496 - RNA, 22 nt, synthetic construct
  source 1..22: mol_type = other RNA
acgtcatatatctttgtggggt

SEQ ID NO: 22497 - RNA, 22 nt, synthetic construct
  source 1..22: mol_type = other RNA
acgtctctatgatttgggtaac

SEQ ID NO: 22498 - RNA, 22 nt, synthetic construct
  source 1..22: mol_type = other RNA
acgtgaactagggaggaataaa

SEQ ID NO: 22499 - RNA, 22 nt, synthetic construct
  source 1..22: mol_type = other RNA
acgtggacattgatggttttct

SEQ ID NO: 22500 - RNA, 22 nt, synthetic construct
  source 1..22: mol_type = other RNA
actaaagacagagacagcaatt

SEQ ID NO: 22501 - RNA, 22 nt, synthetic construct
  source 1..22: mol_type = other RNA
actaactggtaagaacagaaat

SEQ ID NO: 22502 - RNA, 22 nt, synthetic construct
  source 1..22: mol_type = other RNA
actacacacacaaatatgacct

SEQ ID NO: 22503 - RNA, 22 nt, synthetic construct
  source 1..22: mol_type = other RNA
actactgctttacagagaattg

SEQ ID NO: 22504 - RNA, 22 nt, synthetic construct
  source 1..22: mol_type = other RNA
actacttatcatttttggagca

SEQ ID NO: 22505 - RNA, 22 nt, synthetic construct
  source 1..22: mol_type = other RNA
actagaggagcaagtacaacaa

SEQ ID NO: 22506 - RNA, 22 nt, synthetic construct
  source 1..22: mol_type = other RNA
actagctttctccctctcttga

SEQ ID NO: 22507 - RNA, 22 nt, synthetic construct
  source 1..22: mol_type = other RNA
actaggagctcaggagtacaag

SEQ ID NO: 22508 - RNA, 22 nt, synthetic construct
  source 1..22: mol_type = other RNA
actagggaggaataaaagcact

SEQ ID NO: 22509 - RNA, 22 nt, synthetic construct
  source 1..22: mol_type = other RNA
actatgacccacgcagtacaaa

SEQ ID NO: 22510 - RNA, 22 nt, synthetic construct
  source 1..22: mol_type = other RNA
actatgtagctcctgtaacagt

SEQ ID NO: 22511 - RNA, 22 nt, synthetic construct
  source 1..22: mol_type = other RNA
actattccttcaaaaagctcag

SEQ ID NO: 22512 - RNA, 22 nt, synthetic construct
  source 1..22: mol_type = other RNA
actattctgagctttttgaagg

SEQ ID NO: 22513 - RNA, 22 nt, synthetic construct
  source 1..22: mol_type = other RNA
actattttccacatactacaca

SEQ ID NO: 22514 - RNA, 22 nt, synthetic construct
  source 1..22: mol_type = other RNA
actcaagatatgatgcttagag

SEQ ID NO: 22515 - RNA, 22 nt, synthetic construct
  source 1..22: mol_type = other RNA
actcaggtgatcatgctttatg

SEQ ID NO: 22516 - RNA, 22 nt, synthetic construct
  source 1..22: mol_type = other RNA
actcatacttgatcccattttc

SEQ ID NO: 22517 - RNA, 22 nt, synthetic construct
  source 1..22: mol_type = other RNA
actcattaacgcttgctttcac

SEQ ID NO: 22518 - RNA, 22 nt, synthetic construct
  source 1..22: mol_type = other RNA
actccattactggcttgtactg

SEQ ID NO: 22519 - RNA, 22 nt, synthetic construct
  source 1..22: mol_type = other RNA
actccatttacttaaagttggc

SEQ ID NO: 22520 - RNA, 22 nt, synthetic construct
  source 1..22: mol_type = other RNA
actcctaaaactttaagaaagt

SEQ ID NO: 22521 - RNA, 22 nt, synthetic construct
  source 1..22: mol_type = other RNA
actcctgagcagtttgtactgc

SEQ ID NO: 22522 - RNA, 22 nt, synthetic construct
  source 1..22: mol_type = other RNA
actcctgagctcctagtatact

SEQ ID NO: 22523 - RNA, 22 nt, synthetic construct
  source 1..22: mol_type = other RNA
actctcactcatacttgatccc

SEQ ID NO: 22524 - RNA, 22 nt, synthetic construct
  source 1..22: mol_type = other RNA
actctgatgtctagccaacttt

SEQ ID NO: 22525 - RNA, 22 nt, synthetic construct
  source 1..22: mol_type = other RNA
actcttacccagcagtgctttt

SEQ ID NO: 22526 - RNA, 22 nt, synthetic construct
  source 1..22: mol_type = other RNA
actgagcagtaaggaaataaaa

SEQ ID NO: 22527 - RNA, 22 nt, synthetic construct
  source 1..22: mol_type = other RNA
actgatctcagatgcctgtgtg

SEQ ID NO: 22528 - RNA, 22 nt, synthetic construct
  source 1..22: mol_type = other RNA
actgcaagaactgtcttgggcc

SEQ ID NO: 22529 - RNA, 22 nt, synthetic construct
  source 1..22: mol_type = other RNA
actgcaattcattccatgtgac

SEQ ID NO: 22530 - RNA, 22 nt, synthetic construct
  source 1..22: mol_type = other RNA
actgcccttttaaaaaagcagt

SEQ ID NO: 22531 - RNA, 22 nt, synthetic construct
  source 1..22: mol_type = other RNA
actgcggattatcactacttat

SEQ ID NO: 22532 - RNA, 22 nt, synthetic construct
  source 1..22: mol_type = other RNA
actgcgtgggtcatagtaattc

SEQ ID NO: 22533 - RNA, 22 nt, synthetic construct
  source 1..22: mol_type = other RNA
actgctcaggagtcagaagaaa

SEQ ID NO: 22534 - RNA, 22 nt, synthetic construct
  source 1..22: mol_type = other RNA
actgctcagtaaaaagagaaaa

SEQ ID NO: 22535 - RNA, 22 nt, synthetic construct
  source 1..22: mol_type = other RNA
actgctgggtaagagtcaagcc

SEQ ID NO: 22536 - RNA, 22 nt, synthetic construct
  source 1..22: mol_type = other RNA
actgctttacagagaattggat

SEQ ID NO: 22537 - RNA, 22 nt, synthetic construct
  source 1..22: mol_type = other RNA
actgcttttttaaaagggcagt

SEQ ID NO: 22538 - RNA, 22 nt, synthetic construct
  source 1..22: mol_type = other RNA
actggcttgtactgtttacagc

SEQ ID NO: 22539 - RNA, 22 nt, synthetic construct
  source 1..22: mol_type = other RNA
actggtaagaacagaaatgaga

SEQ ID NO: 22540 - RNA, 22 nt, synthetic construct
  source 1..22: mol_type = other RNA
actggtttctcaagcaaaagct

SEQ ID NO: 22541 - RNA, 22 nt, synthetic construct
  source 1..22: mol_type = other RNA
actgtattagcaatataaaaag

SEQ ID NO: 22542 - RNA, 22 nt, synthetic construct
  source 1..22: mol_type = other RNA
actgtccacagttgcaattcaa

SEQ ID NO: 22543 - RNA, 22 nt, synthetic construct
  source 1..22: mol_type = other RNA
actgtcttgggccacatataaa

SEQ ID NO: 22544 - RNA, 22 nt, synthetic construct
  source 1..22: mol_type = other RNA
actgtgaagacggtcagggaca

SEQ ID NO: 22545 - RNA, 22 nt, synthetic construct
  source 1..22: mol_type = other RNA
actgtggacagtatagctgtag

SEQ ID NO: 22546 - RNA, 22 nt, synthetic construct
  source 1..22: mol_type = other RNA
actgttacaggagctacatagt

SEQ ID NO: 22547 - RNA, 22 nt, synthetic construct
  source 1..22: mol_type = other RNA
actgttgtccaaggcaggcaca

SEQ ID NO: 22548 - RNA, 22 nt, synthetic construct
  source 1..22: mol_type = other RNA
actgtttacagcaagttgtcta

SEQ ID NO: 22549 - RNA, 22 nt, synthetic construct
  source 1..22: mol_type = other RNA
acttaaagttggctagacatca

SEQ ID NO: 22550 - RNA, 22 nt, synthetic construct
  source 1..22: mol_type = other RNA
acttactttgtgattgttttct

SEQ ID NO: 22551 - RNA, 22 nt, synthetic construct
  source 1..22: mol_type = other RNA
acttatcatttttggagcattt

SEQ ID NO: 22552 - RNA, 22 nt, synthetic construct
  source 1..22: mol_type = other RNA
acttcaggagagaggtcatatt

SEQ ID NO: 22553 - RNA, 22 nt, synthetic construct
  source 1..22: mol_type = other RNA
acttcctggaaacacttgattg

SEQ ID NO: 22554 - RNA, 22 nt, synthetic construct
  source 1..22: mol_type = other RNA
acttgaatgaagaataggtctg

SEQ ID NO: 22555 - RNA, 22 nt, synthetic construct
  source 1..22: mol_type = other RNA
acttgatcccattttccatttg

SEQ ID NO: 22556 - RNA, 22 nt, synthetic construct
  source 1..22: mol_type = other RNA
acttgattggaggagctctaag

SEQ ID NO: 22557 - RNA, 22 nt, synthetic construct
  source 1..22: mol_type = other RNA
acttgctcctctagtattcaga

SEQ ID NO: 22558 - RNA, 22 nt, synthetic construct
  source 1..22: mol_type = other RNA
acttgctgtaaacagtacaagc

SEQ ID NO: 22559 - RNA, 22 nt, synthetic construct
  source 1..22: mol_type = other RNA
acttgtaggacagaaatttagg

SEQ ID NO: 22560 - RNA, 22 nt, synthetic construct
  source 1..22: mol_type = other RNA
acttgttctgtggattacagaa

SEQ ID NO: 22561 - RNA, 22 nt, synthetic construct
  source 1..22: mol_type = other RNA
actttaagtaaatggagtgagc

SEQ ID NO: 22562 - RNA, 22 nt, synthetic construct
  source 1..22: mol_type = other RNA
actttcctcaatttaacagctt

SEQ ID NO: 22563 - RNA, 22 nt, synthetic construct
  source 1..22: mol_type = other RNA
actttggtggtgcagcaagggt

SEQ ID NO: 22564 - RNA, 22 nt, synthetic construct
  source 1..22: mol_type = other RNA
actttgtgattgttttctataa

SEQ ID NO: 22565 - RNA, 22 nt, synthetic construct
  source 1..22: mol_type = other RNA
acttttccaatgctcaagatta

SEQ ID NO: 22566 - RNA, 22 nt, synthetic construct
  source 1..22: mol_type = other RNA
agaaaaagggagatgttgccta

SEQ ID NO: 22567 - RNA, 22 nt, synthetic construct
  source 1..22: mol_type = other RNA
agaaaaatgctccaaaaatgat

SEQ ID NO: 22568 - RNA, 22 nt, synthetic construct
  source 1..22: mol_type = other RNA
agaaaaattttagcttttgctt

SEQ ID NO: 22569 - RNA, 22 nt, synthetic construct
  source 1..22: mol_type = other RNA
agaaaacaatcacaaagtaagt

SEQ ID NO: 22570 - RNA, 22 nt, synthetic construct
  source 1..22: mol_type = other RNA
agaaaaccatcaatgtccacgt

SEQ ID NO: 22571 - RNA, 22 nt, synthetic construct
  source 1..22: mol_type = other RNA
agaaaactgcttttttaaaagg

SEQ ID NO: 22572 - RNA, 22 nt, synthetic construct
  source 1..22: mol_type = other RNA
agaaaccagtgcttccctccct

SEQ ID NO: 22573 - RNA, 22 nt, synthetic construct
  source 1..22: mol_type = other RNA
agaaagctagtgctatgtctga

SEQ ID NO: 22574 - RNA, 22 nt, synthetic construct
  source 1..22: mol_type = other RNA
agaaatgagaggtatttagagg

SEQ ID NO: 22575 - RNA, 22 nt, synthetic construct
  source 1..22: mol_type = other RNA
agaaatttaggctgggttcatt

SEQ ID NO: 22576 - RNA, 22 nt, synthetic construct
  source 1..22: mol_type = other RNA
agaacaacagaccatggaaggc

SEQ ID NO: 22577 - RNA, 22 nt, synthetic construct
  source 1..22: mol_type = other RNA
agaacaagtccggggctacagc

SEQ ID NO: 22578 - RNA, 22 nt, synthetic construct
  source 1..22: mol_type = other RNA
agaacagaaatgagaggtattt

SEQ ID NO: 22579 - RNA, 22 nt, synthetic construct
  source 1..22: mol_type = other RNA
agaacagaattcatcctgtaaa

SEQ ID NO: 22580 - RNA, 22 nt, synthetic construct
  source 1..22: mol_type = other RNA
agaaccaccccacaaagatata

SEQ ID NO: 22581 - RNA, 22 nt, synthetic construct
  source 1..22: mol_type = other RNA
agaacgtgaactagggaggaat

SEQ ID NO: 22582 - RNA, 22 nt, synthetic construct
  source 1..22: mol_type = other RNA
agaactgtcttgggccacatat

SEQ ID NO: 22583 - RNA, 22 nt, synthetic construct
  source 1..22: mol_type = other RNA
agaacttgaatgaagaataggt

SEQ ID NO: 22584 - RNA, 22 nt, synthetic construct
  source 1..22: mol_type = other RNA
agaagaaaactgcttttttaaa

SEQ ID NO: 22585 - RNA, 22 nt, synthetic construct
  source 1..22: mol_type = other RNA
agaatacgtggacattgatggt

SEQ ID NO: 22586 - RNA, 22 nt, synthetic construct
  source 1..22: mol_type = other RNA
agaataggtctgtgtgatacaa

SEQ ID NO: 22587 - RNA, 22 nt, synthetic construct
  source 1..22: mol_type = other RNA
agaatcccagctaaggaaaaag

SEQ ID NO: 22588 - RNA, 22 nt, synthetic construct
  source 1..22: mol_type = other RNA
agaattactatgacccacgcag

SEQ ID NO: 22589 - RNA, 22 nt, synthetic construct
  source 1..22: mol_type = other RNA
agaattcatcctgtaaaccagg

SEQ ID NO: 22590 - RNA, 22 nt, synthetic construct
  source 1..22: mol_type = other RNA
agaattggatctgaggttaggc

SEQ ID NO: 22591 - RNA, 22 nt, synthetic construct
  source 1..22: mol_type = other RNA
agacaacttgctgtaaacagta

SEQ ID NO: 22592 - RNA, 22 nt, synthetic construct
  source 1..22: mol_type = other RNA
agacaccaggctacccaagatc

SEQ ID NO: 22593 - RNA, 22 nt, synthetic construct
  source 1..22: mol_type = other RNA
agacactattccttcaaaaagc

SEQ ID NO: 22594 - RNA, 22 nt, synthetic construct
  source 1..22: mol_type = other RNA
agacagacataaagcatgatca

SEQ ID NO: 22595 - RNA, 22 nt, synthetic construct
  source 1..22: mol_type = other RNA
agacagagacagcaatttggaa

SEQ ID NO: 22596 - RNA, 22 nt, synthetic construct
  source 1..22: mol_type = other RNA
agacagattggttccaccacaa

SEQ ID NO: 22597 - RNA, 22 nt, synthetic construct
  source 1..22: mol_type = other RNA
agacagcaatttggaagctatc

SEQ ID NO: 22598 - RNA, 22 nt, synthetic construct
  source 1..22: mol_type = other RNA
agacagttcttgcagtgtggcc

SEQ ID NO: 22599 - RNA, 22 nt, synthetic construct
  source 1..22: mol_type = other RNA
agacataaagcatgatcacctg

SEQ ID NO: 22600 - RNA, 22 nt, synthetic construct
  source 1..22: mol_type = other RNA
agacatagcactagctttctcc

SEQ ID NO: 22601 - RNA, 22 nt, synthetic construct
  source 1..22: mol_type = other RNA
agacatcagagtatactaggag

SEQ ID NO: 22602 - RNA, 22 nt, synthetic construct
  source 1..22: mol_type = other RNA
agacatttacatgtcgctcact

SEQ ID NO: 22603 - RNA, 22 nt, synthetic construct
  source 1..22: mol_type = other RNA
agaccatggaaggcatgaccaa

SEQ ID NO: 22604 - RNA, 22 nt, synthetic construct
  source 1..22: mol_type = other RNA
agacccttgctgcaccaccaaa

SEQ ID NO: 22605 - RNA, 22 nt, synthetic construct
  source 1..22: mol_type = other RNA
agacctattcttcattcaagtt

SEQ ID NO: 22606 - RNA, 22 nt, synthetic construct
  source 1..22: mol_type = other RNA
agacggtcagggacagaatccc

SEQ ID NO: 22607 - RNA, 22 nt, synthetic construct
  source 1..22: mol_type = other RNA
agacgtcatatatctttgtggg

SEQ ID NO: 22608 - RNA, 22 nt, synthetic construct
  source 1..22: mol_type = other RNA
agactgcggattatcactactt

SEQ ID NO: 22609 - RNA, 22 nt, synthetic construct
  source 1..22: mol_type = other RNA
agactttcctcaatttaacagc

SEQ ID NO: 22610 - RNA, 22 nt, synthetic construct
  source 1..22: mol_type = other RNA
agagaaaaccatcaatgtccac

SEQ ID NO: 22611 - RNA, 22 nt, synthetic construct
  source 1..22: mol_type = other RNA
agagaattggatctgaggttag

SEQ ID NO: 22612 - RNA, 22 nt, synthetic construct
  source 1..22: mol_type = other RNA
agagacagacataaagcatgat

SEQ ID NO: 22613 - RNA, 22 nt, synthetic construct
  source 1..22: mol_type = other RNA
agagacagcaatttggaagcta

SEQ ID NO: 22614 - RNA, 22 nt, synthetic construct
  source 1..22: mol_type = other RNA
agagacgtcatatatctttgtg

SEQ ID NO: 22615 - RNA, 22 nt, synthetic construct
  source 1..22: mol_type = other RNA
agagagcctggggagagagggt

SEQ ID NO: 22616 - RNA, 22 nt, synthetic construct
  source 1..22: mol_type = other RNA
agagagcttcagcttttatttc

SEQ ID NO: 22617 - RNA, 22 nt, synthetic construct
  source 1..22: mol_type = other RNA
agagagggagaaagctagtgct

SEQ ID NO: 22618 - RNA, 22 nt, synthetic construct
  source 1..22: mol_type = other RNA
agagagggtgagggagggaagc

SEQ ID NO: 22619 - RNA, 22 nt, synthetic construct
  source 1..22: mol_type = other RNA
agagaggtcatatttgtgtgtg

SEQ ID NO: 22620 - RNA, 22 nt, synthetic construct
  source 1..22: mol_type = other RNA
agagcatgaaaatgacaggtga

SEQ ID NO: 22621 - RNA, 22 nt, synthetic construct
  source 1..22: mol_type = other RNA
agagcctggggagagagggtga

SEQ ID NO: 22622 - RNA, 22 nt, synthetic construct
  source 1..22: mol_type = other RNA
agagctcctccaatcaagtgtt

SEQ ID NO: 22623 - RNA, 22 nt, synthetic construct
  source 1..22: mol_type = other RNA
agagcttcagcttttatttcct

SEQ ID NO: 22624 - RNA, 22 nt, synthetic construct
  source 1..22: mol_type = other RNA
agaggaagaaaaagggagatgt

SEQ ID NO: 22625 - RNA, 22 nt, synthetic construct
  source 1..22: mol_type = other RNA
agaggagcaagtacaacaaatg

SEQ ID NO: 22626 - RNA, 22 nt, synthetic construct
  source 1..22: mol_type = other RNA
agagggagaaagctagtgctat

SEQ ID NO: 22627 - RNA, 22 nt, synthetic construct
  source 1..22: mol_type = other RNA
agagggtgagggagggaagcac

SEQ ID NO: 22628 - RNA, 22 nt, synthetic construct
  source 1..22: mol_type = other RNA
agaggtatttagaggaagaaaa

SEQ ID NO: 22629 - RNA, 22 nt, synthetic construct
  source 1..22: mol_type = other RNA
agaggtcatatttgtgtgtgta

SEQ ID NO: 22630 - RNA, 22 nt, synthetic construct
  source 1..22: mol_type = other RNA
agagtatactaggagctcagga

SEQ ID NO: 22631 - RNA, 22 nt, synthetic construct
  source 1..22: mol_type = other RNA
agagtcaagccccagctcaagc

SEQ ID NO: 22632 - RNA, 22 nt, synthetic construct
  source 1..22: mol_type = other RNA
agagttgctaagatgcctggta

SEQ ID NO: 22633 - RNA, 22 nt, synthetic construct
  source 1..22: mol_type = other RNA
agataaacatttaagaacgtga

SEQ ID NO: 22634 - RNA, 22 nt, synthetic construct
  source 1..22: mol_type = other RNA
agataacactaaagacagagac

SEQ ID NO: 22635 - RNA, 22 nt, synthetic construct
  source 1..22: mol_type = other RNA
agatagagcatgaaaatgacag

SEQ ID NO: 22636 - RNA, 22 nt, synthetic construct
  source 1..22: mol_type = other RNA
agatatatgacgtctctatgat

SEQ ID NO: 22637 - RNA, 22 nt, synthetic construct
  source 1..22: mol_type = other RNA
agatatgatgcttagagctcct

SEQ ID NO: 22638 - RNA, 22 nt, synthetic construct
  source 1..22: mol_type = other RNA
agatcaagagagggagaaagct

SEQ ID NO: 22639 - RNA, 22 nt, synthetic construct
  source 1..22: mol_type = other RNA
agatcacctggactgtgaagac

SEQ ID NO: 22640 - RNA, 22 nt, synthetic construct
  source 1..22: mol_type = other RNA
agatcagttactaactggtaag

SEQ ID NO: 22641 - RNA, 22 nt, synthetic construct
  source 1..22: mol_type = other RNA
agatccaattctctgtaaagca

SEQ ID NO: 22642 - RNA, 22 nt, synthetic construct
  source 1..22: mol_type = other RNA
agatgacatttgaatctgcagg

SEQ ID NO: 22643 - RNA, 22 nt, synthetic construct
  source 1..22: mol_type = other RNA
agatgcctggtagggatgcaaa

SEQ ID NO: 22644 - RNA, 22 nt, synthetic construct
  source 1..22: mol_type = other RNA
agatgcctgtgtgatagcttcc

SEQ ID NO: 22645 - RNA, 22 nt, synthetic construct
  source 1..22: mol_type = other RNA
agatggatcaaaagataacact

SEQ ID NO: 22646 - RNA, 22 nt, synthetic construct
  source 1..22: mol_type = other RNA
agatgtaagatggatcaaaaga

SEQ ID NO: 22647 - RNA, 22 nt, synthetic construct
  source 1..22: mol_type = other RNA
agatgtgcctgccttggacaac

SEQ ID NO: 22648 - RNA, 22 nt, synthetic construct
  source 1..22: mol_type = other RNA
agatgttgcctaacctcagatc

SEQ ID NO: 22649 - RNA, 22 nt, synthetic construct
  source 1..22: mol_type = other RNA
agattcaaatgtcatctcccct

SEQ ID NO: 22650 - RNA, 22 nt, synthetic construct
  source 1..22: mol_type = other RNA
agattccattaaactgttacag

SEQ ID NO: 22651 - RNA, 22 nt, synthetic construct
  source 1..22: mol_type = other RNA
agattggacacccctggtttac

SEQ ID NO: 22652 - RNA, 22 nt, synthetic construct
  source 1..22: mol_type = other RNA
agattggttccaccacaaatta

SEQ ID NO: 22653 - RNA, 22 nt, synthetic construct
  source 1..22: mol_type = other RNA
agatttaacctgatgctacact

SEQ ID NO: 22654 - RNA, 22 nt, synthetic construct
  source 1..22: mol_type = other RNA
agcaactctcactcatacttga

SEQ ID NO: 22655 - RNA, 22 nt, synthetic construct
  source 1..22: mol_type = other RNA
agcaagcgttaatgagtttgga

SEQ ID NO: 22656 - RNA, 22 nt, synthetic construct
  source 1..22: mol_type = other RNA
agcaagggtagcattccaaaaa

SEQ ID NO: 22657 - RNA, 22 nt, synthetic construct
  source 1..22: mol_type = other RNA
agcaagggtctcaaatggtata

SEQ ID NO: 22658 - RNA, 22 nt, synthetic construct
  source 1..22: mol_type = other RNA
agcaagtacaacaaatggaaaa

SEQ ID NO: 22659 - RNA, 22 nt, synthetic construct
  source 1..22: mol_type = other RNA
agcaagttgtctaacccgcggg

SEQ ID NO: 22660 - RNA, 22 nt, synthetic construct
  source 1..22: mol_type = other RNA
agcaatgacaacaaccccagaa

SEQ ID NO: 22661 - RNA, 22 nt, synthetic construct
  source 1..22: mol_type = other RNA
agcaatttggaagctatcacac

SEQ ID NO: 22662 - RNA, 22 nt, synthetic construct
  source 1..22: mol_type = other RNA
agcactagctttctccctctct

SEQ ID NO: 22663 - RNA, 22 nt, synthetic construct
  source 1..22: mol_type = other RNA
agcactgctgggtaagagtcaa

SEQ ID NO: 22664 - RNA, 22 nt, synthetic construct
  source 1..22: mol_type = other RNA
agcactggtttctcaagcaaaa

SEQ ID NO: 22665 - RNA, 22 nt, synthetic construct
  source 1..22: mol_type = other RNA
agcagcaagggtagcattccaa

SEQ ID NO: 22666 - RNA, 22 nt, synthetic construct
  source 1..22: mol_type = other RNA
agcagtaaggaaataaaagctg

SEQ ID NO: 22667 - RNA, 22 nt, synthetic construct
  source 1..22: mol_type = other RNA
agcagtagtcaagatcacctgg

SEQ ID NO: 22668 - RNA, 22 nt, synthetic construct
  source 1..22: mol_type = other RNA
agcagtgcttttattcctccct

SEQ ID NO: 22669 - RNA, 22 nt, synthetic construct
  source 1..22: mol_type = other RNA
agcagttaaatgaaatgtaatg

SEQ ID NO: 22670 - RNA, 22 nt, synthetic construct
  source 1..22: mol_type = other RNA
agcagtttgtactgcgtgggtc

SEQ ID NO: 22671 - RNA, 22 nt, synthetic construct
  source 1..22: mol_type = other RNA
agcagttttcttctgactcctg

SEQ ID NO: 22672 - RNA, 22 nt, synthetic construct
  source 1..22: mol_type = other RNA
agcatcatatcttgagttatag

SEQ ID NO: 22673 - RNA, 22 nt, synthetic construct
  source 1..22: mol_type = other RNA
agcatgaaaatgacaggtgaaa

SEQ ID NO: 22674 - RNA, 22 nt, synthetic construct
  source 1..22: mol_type = other RNA
agcatgatcacctgagttttat

SEQ ID NO: 22675 - RNA, 22 nt, synthetic construct
  source 1..22: mol_type = other RNA
agcattccaaaaagaaccaccc

SEQ ID NO: 22676 - RNA, 22 nt, synthetic construct
  source 1..22: mol_type = other RNA
agcattggaaaagtggctggta

SEQ ID NO: 22677 - RNA, 22 nt, synthetic construct
  source 1..22: mol_type = other RNA
agcatttggtgttaaaatgttg

SEQ ID NO: 22678 - RNA, 22 nt, synthetic construct
  source 1..22: mol_type = other RNA
agcatttttctagagacagaca

SEQ ID NO: 22679 - RNA, 22 nt, synthetic construct
  source 1..22: mol_type = other RNA
agccaactttaagtaaatggag

SEQ ID NO: 22680 - RNA, 22 nt, synthetic construct
  source 1..22: mol_type = other RNA
agccacttttccaatgctcaag

SEQ ID NO: 22681 - RNA, 22 nt, synthetic construct
  source 1..22: mol_type = other RNA
agccagtaatggagtttcacct

SEQ ID NO: 22682 - RNA, 22 nt, synthetic construct
  source 1..22: mol_type = other RNA
agccccagctcaagccttaatt

SEQ ID NO: 22683 - RNA, 22 nt, synthetic construct
  source 1..22: mol_type = other RNA
agccccggacttgttctgtgga

SEQ ID NO: 22684 - RNA, 22 nt, synthetic construct
  source 1..22: mol_type = other RNA
agccgaaagattggacacccct

SEQ ID NO: 22685 - RNA, 22 nt, synthetic construct
  source 1..22: mol_type = other RNA
agcctaaatttctgtcctacaa

SEQ ID NO: 22686 - RNA, 22 nt, synthetic construct
  source 1..22: mol_type = other RNA
agcctggggagagagggtgagg

SEQ ID NO: 22687 - RNA, 22 nt, synthetic construct
  source 1..22: mol_type = other RNA
agcctggtgtctcgcgaaacca

SEQ ID NO: 22688 - RNA, 22 nt, synthetic construct
  source 1..22: mol_type = other RNA
agccttaatttgtggtggaacc

SEQ ID NO: 22689 - RNA, 22 nt, synthetic construct
  source 1..22: mol_type = other RNA
agcgacatgtaaatgtctttat

SEQ ID NO: 22690 - RNA, 22 nt, synthetic construct
  source 1..22: mol_type = other RNA
agctaaggaaaaaggataaaat

SEQ ID NO: 22691 - RNA, 22 nt, synthetic construct
  source 1..22: mol_type = other RNA
agctaagtccaacaaaccattt

SEQ ID NO: 22692 - RNA, 22 nt, synthetic construct
  source 1..22: mol_type = other RNA
agctacatagttaaatatatca

SEQ ID NO: 22693 - RNA, 22 nt, synthetic construct
  source 1..22: mol_type = other RNA
agctagtgctatgtctgaatac

SEQ ID NO: 22694 - RNA, 22 nt, synthetic construct
  source 1..22: mol_type = other RNA
agctatactgtccacagttgca

SEQ ID NO: 22695 - RNA, 22 nt, synthetic construct
  source 1..22: mol_type = other RNA
agctatcacacaggcatctgag

SEQ ID NO: 22696 - RNA, 22 nt, synthetic construct
  source 1..22: mol_type = other RNA
agctcaagccttaatttgtggt

SEQ ID NO: 22697 - RNA, 22 nt, synthetic construct
  source 1..22: mol_type = other RNA
agctcagaatagttaaggtaat

SEQ ID NO: 22698 - RNA, 22 nt, synthetic construct
  source 1..22: mol_type = other RNA
agctcaggagtacaagacacta

SEQ ID NO: 22699 - RNA, 22 nt, synthetic construct
  source 1..22: mol_type = other RNA
agctcctagtatactctgatgt

SEQ ID NO: 22700 - RNA, 22 nt, synthetic construct
  source 1..22: mol_type = other RNA
agctcctccaatcaagtgtttc

SEQ ID NO: 22701 - RNA, 22 nt, synthetic construct
  source 1..22: mol_type = other RNA
agctcctgtaacagtttaatgg

SEQ ID NO: 22702 - RNA, 22 nt, synthetic construct
  source 1..22: mol_type = other RNA
agctctaagcatcatatcttga

SEQ ID NO: 22703 - RNA, 22 nt, synthetic construct
  source 1..22: mol_type = other RNA
agctctctggcccattacattt

SEQ ID NO: 22704 - RNA, 22 nt, synthetic construct
  source 1..22: mol_type = other RNA
agctgaaagctaagtccaacaa

SEQ ID NO: 22705 - RNA, 22 nt, synthetic construct
  source 1..22: mol_type = other RNA
agctgaagctctctggcccatt

SEQ ID NO: 22706 - RNA, 22 nt, synthetic construct
  source 1..22: mol_type = other RNA
agctgggattctgtccctgacc

SEQ ID NO: 22707 - RNA, 22 nt, synthetic construct
  source 1..22: mol_type = other RNA
agctggggcttgactcttaccc

SEQ ID NO: 22708 - RNA, 22 nt, synthetic construct
  source 1..22: mol_type = other RNA
agctgtagccccggacttgttc

SEQ ID NO: 22709 - RNA, 22 nt, synthetic construct
  source 1..22: mol_type = other RNA
agctgtcctgggtcccatgcgg

SEQ ID NO: 22710 - RNA, 22 nt, synthetic construct
  source 1..22: mol_type = other RNA
agctgtcctttatatgtggccc

SEQ ID NO: 22711 - RNA, 22 nt, synthetic construct
  source 1..22: mol_type = other RNA
agctgttaaattgaggaaagtc

SEQ ID NO: 22712 - RNA, 22 nt, synthetic construct
  source 1..22: mol_type = other RNA
agcttcagcttttatttcctta

SEQ ID NO: 22713 - RNA, 22 nt, synthetic construct
  source 1..22: mol_type = other RNA
agcttccaaattgctgtctctg

SEQ ID NO: 22714 - RNA, 22 nt, synthetic construct
  source 1..22: mol_type = other RNA
agctttctccctctcttgatct

SEQ ID NO: 22715 - RNA, 22 nt, synthetic construct
  source 1..22: mol_type = other RNA
agcttttatttccttactgctc

SEQ ID NO: 22716 - RNA, 22 nt, synthetic construct
  source 1..22: mol_type = other RNA
agcttttgcttgagaaaccagt

SEQ ID NO: 22717 - RNA, 22 nt, synthetic construct
  source 1..22: mol_type = other RNA
agctttttcatttttcactatt

SEQ ID NO: 22718 - RNA, 22 nt, synthetic construct
  source 1..22: mol_type = other RNA
agctttttgaaggaatagtgtc

SEQ ID NO: 22719 - RNA, 22 nt, synthetic construct
  source 1..22: mol_type = other RNA
aggaaagtctatccagggacct

SEQ ID NO: 22720 - RNA, 22 nt, synthetic construct
  source 1..22: mol_type = other RNA
aggaaataaaagctgaagctct

SEQ ID NO: 22721 - RNA, 22 nt, synthetic construct
  source 1..22: mol_type = other RNA
aggaagaaaaagggagatgttg

SEQ ID NO: 22722 - RNA, 22 nt, synthetic construct
  source 1..22: mol_type = other RNA
aggaagatagagcatgaaaatg

SEQ ID NO: 22723 - RNA, 22 nt, synthetic construct
  source 1..22: mol_type = other RNA
aggaagtgaaaacttgtaggac

SEQ ID NO: 22724 - RNA, 22 nt, synthetic construct
  source 1..22: mol_type = other RNA
aggaataaaagcactgctgggt

SEQ ID NO: 22725 - RNA, 22 nt, synthetic construct
  source 1..22: mol_type = other RNA
aggaatagtgtcttgtactcct

SEQ ID NO: 22726 - RNA, 22 nt, synthetic construct
  source 1..22: mol_type = other RNA
aggaattataataccaacattt

SEQ ID NO: 22727 - RNA, 22 nt, synthetic construct
  source 1..22: mol_type = other RNA
aggacaatcatcctaacaagat

SEQ ID NO: 22728 - RNA, 22 nt, synthetic construct
  source 1..22: mol_type = other RNA
aggacagaaatttaggctgggt

SEQ ID NO: 22729 - RNA, 22 nt, synthetic construct
  source 1..22: mol_type = other RNA
aggagagaggtcatatttgtgt

SEQ ID NO: 22730 - RNA, 22 nt, synthetic construct
  source 1..22: mol_type = other RNA
aggagcaagtacaacaaatgga

SEQ ID NO: 22731 - RNA, 22 nt, synthetic construct
  source 1..22: mol_type = other RNA
aggagctacatagttaaatata

SEQ ID NO: 22732 - RNA, 22 nt, synthetic construct
  source 1..22: mol_type = other RNA
aggagctcaggagtacaagaca

SEQ ID NO: 22733 - RNA, 22 nt, synthetic construct
  source 1..22: mol_type = other RNA
aggagctctaagcatcatatct

SEQ ID NO: 22734 - RNA, 22 nt, synthetic construct
  source 1..22: mol_type = other RNA
aggagtacaagacactattcct

SEQ ID NO: 22735 - RNA, 22 nt, synthetic construct
  source 1..22: mol_type = other RNA
aggagtcagaagaaaactgctt

SEQ ID NO: 22736 - RNA, 22 nt, synthetic construct
  source 1..22: mol_type = other RNA
aggataaaacttactttgtgat

SEQ ID NO: 22737 - RNA, 22 nt, synthetic construct
  source 1..22: mol_type = other RNA
aggatgaattctgttctcgtga

SEQ ID NO: 22738 - RNA, 22 nt, synthetic construct
  source 1..22: mol_type = other RNA
aggatgattgtcctaaaggaag

SEQ ID NO: 22739 - RNA, 22 nt, synthetic construct
  source 1..22: mol_type = other RNA
aggattaaaagcagcaagggta

SEQ ID NO: 22740 - RNA, 22 nt, synthetic construct
  source 1..22: mol_type = other RNA
aggcaacatctccctttttctt

SEQ ID NO: 22741 - RNA, 22 nt, synthetic construct
  source 1..22: mol_type = other RNA
aggcacatctttaaaaatggtt

SEQ ID NO: 22742 - RNA, 22 nt, synthetic construct
  source 1..22: mol_type = other RNA
aggcaggcacatctttaaaaat

SEQ ID NO: 22743 - RNA, 22 nt, synthetic construct
  source 1..22: mol_type = other RNA
aggcatctgagatcagttacta

SEQ ID NO: 22744 - RNA, 22 nt, synthetic construct
  source 1..22: mol_type = other RNA
aggcatcttagcaactctcact

SEQ ID NO: 22745 - RNA, 22 nt, synthetic construct
  source 1..22: mol_type = other RNA
aggcatgaccaaaggggagatg

SEQ ID NO: 22746 - RNA, 22 nt, synthetic construct
  source 1..22: mol_type = other RNA
aggctacccaagatcaagagag

SEQ ID NO: 22747 - RNA, 22 nt, synthetic construct
  source 1..22: mol_type = other RNA
aggctctctacccctttgcatc

SEQ ID NO: 22748 - RNA, 22 nt, synthetic construct
  source 1..22: mol_type = other RNA
aggctgggttcatttgtatcac

SEQ ID NO: 22749 - RNA, 22 nt, synthetic construct
  source 1..22: mol_type = other RNA
aggcttgagctggggcttgact

SEQ ID NO: 22750 - RNA, 22 nt, synthetic construct
  source 1..22: mol_type = other RNA
agggaagcactggtttctcaag

SEQ ID NO: 22751 - RNA, 22 nt, synthetic construct
  source 1..22: mol_type = other RNA
agggacagaatcccagctaagg

SEQ ID NO: 22752 - RNA, 22 nt, synthetic construct
  source 1..22: mol_type = other RNA
agggaccttatgcatcacattc

SEQ ID NO: 22753 - RNA, 22 nt, synthetic construct
  source 1..22: mol_type = other RNA
agggagaaagctagtgctatgt

SEQ ID NO: 22754 - RNA, 22 nt, synthetic construct
  source 1..22: mol_type = other RNA
agggagatgttgcctaacctca

SEQ ID NO: 22755 - RNA, 22 nt, synthetic construct
  source 1..22: mol_type = other RNA
agggaggaataaaagcactgct

SEQ ID NO: 22756 - RNA, 22 nt, synthetic construct
  source 1..22: mol_type = other RNA
agggagggaagcactggtttct

SEQ ID NO: 22757 - RNA, 22 nt, synthetic construct
  source 1..22: mol_type = other RNA
agggaggtgagattccattaaa

SEQ ID NO: 22758 - RNA, 22 nt, synthetic construct
  source 1..22: mol_type = other RNA
agggatgcaaaggggtagagag

SEQ ID NO: 22759 - RNA, 22 nt, synthetic construct
  source 1..22: mol_type = other RNA
agggcagtttgggtcatagaac

SEQ ID NO: 22760 - RNA, 22 nt, synthetic construct
  source 1..22: mol_type = other RNA
aggggagatgacatttgaatct

SEQ ID NO: 22761 - RNA, 22 nt, synthetic construct
  source 1..22: mol_type = other RNA
aggggtagagagcctggggaga

SEQ ID NO: 22762 - RNA, 22 nt, synthetic construct
  source 1..22: mol_type = other RNA
agggtagcattccaaaaagaac

SEQ ID NO: 22763 - RNA, 22 nt, synthetic construct
  source 1..22: mol_type = other RNA
agggtctcaaatggtataaaac

SEQ ID NO: 22764 - RNA, 22 nt, synthetic construct
  source 1..22: mol_type = other RNA
agggtgagggagggaagcactg

SEQ ID NO: 22765 - RNA, 22 nt, synthetic construct
  source 1..22: mol_type = other RNA
aggtaatttaaatcagcaatga

SEQ ID NO: 22766 - RNA, 22 nt, synthetic construct
  source 1..22: mol_type = other RNA
aggtatttagaggaagaaaaag

SEQ ID NO: 22767 - RNA, 22 nt, synthetic construct
  source 1..22: mol_type = other RNA
aggtcatatttgtgtgtgtagt

SEQ ID NO: 22768 - RNA, 22 nt, synthetic construct
  source 1..22: mol_type = other RNA
aggtccctggatagactttcct

SEQ ID NO: 22769 - RNA, 22 nt, synthetic construct
  source 1..22: mol_type = other RNA
aggtctgtgtgatacaaatgaa

SEQ ID NO: 22770 - RNA, 22 nt, synthetic construct
  source 1..22: mol_type = other RNA
aggtgaaactccattactggct

SEQ ID NO: 22771 - RNA, 22 nt, synthetic construct
  source 1..22: mol_type = other RNA
aggtgagattccattaaactgt

SEQ ID NO: 22772 - RNA, 22 nt, synthetic construct
  source 1..22: mol_type = other RNA
aggtgatcatgctttatgtctg

SEQ ID NO: 22773 - RNA, 22 nt, synthetic construct
  source 1..22: mol_type = other RNA
aggtgatcttgactactgcttt

SEQ ID NO: 22774 - RNA, 22 nt, synthetic construct
  source 1..22: mol_type = other RNA
aggttaggcaacatctcccttt

SEQ ID NO: 22775 - RNA, 22 nt, synthetic construct
  source 1..22: mol_type = other RNA
agtaaaaagagaaaaccatcaa

SEQ ID NO: 22776 - RNA, 22 nt, synthetic construct
  source 1..22: mol_type = other RNA
agtaaatggagtgagcgacatg

SEQ ID NO: 22777 - RNA, 22 nt, synthetic construct
  source 1..22: mol_type = other RNA
agtaactgatctcagatgcctg

SEQ ID NO: 22778 - RNA, 22 nt, synthetic construct
  source 1..22: mol_type = other RNA
agtaaggaaataaaagctgaag

SEQ ID NO: 22779 - RNA, 22 nt, synthetic construct
  source 1..22: mol_type = other RNA
agtaagttttatcctgaggaat

SEQ ID NO: 22780 - RNA, 22 nt, synthetic construct
  source 1..22: mol_type = other RNA
agtaatggagtttcacctgtca

SEQ ID NO: 22781 - RNA, 22 nt, synthetic construct
  source 1..22: mol_type = other RNA
agtaattctggggttgttgtca

SEQ ID NO: 22782 - RNA, 22 nt, synthetic construct
  source 1..22: mol_type = other RNA
agtacaaactgctcaggagtca

SEQ ID NO: 22783 - RNA, 22 nt, synthetic construct
  source 1..22: mol_type = other RNA
agtacaacaaatggaaaatggg

SEQ ID NO: 22784 - RNA, 22 nt, synthetic construct
  source 1..22: mol_type = other RNA
agtacaagacactattccttca

SEQ ID NO: 22785 - RNA, 22 nt, synthetic construct
  source 1..22: mol_type = other RNA
agtacaagccagtaatggagtt

SEQ ID NO: 22786 - RNA, 22 nt, synthetic construct
  source 1..22: mol_type = other RNA
agtagtcaagatcacctggact

SEQ ID NO: 22787 - RNA, 22 nt, synthetic construct
  source 1..22: mol_type = other RNA
agtatactaggagctcaggagt

SEQ ID NO: 22788 - RNA, 22 nt, synthetic construct
  source 1..22: mol_type = other RNA
agtatactctgatgtctagcca

SEQ ID NO: 22789 - RNA, 22 nt, synthetic construct
  source 1..22: mol_type = other RNA
agtatagctgtagccccggact

SEQ ID NO: 22790 - RNA, 22 nt, synthetic construct
  source 1..22: mol_type = other RNA
agtatgagtgagagttgctaag

SEQ ID NO: 22791 - RNA, 22 nt, synthetic construct
  source 1..22: mol_type = other RNA
agtattcagacatagcactagc

SEQ ID NO: 22792 - RNA, 22 nt, synthetic construct
  source 1..22: mol_type = other RNA
agtcaagatcacctggactgtg

SEQ ID NO: 22793 - RNA, 22 nt, synthetic construct
  source 1..22: mol_type = other RNA
agtcaagccccagctcaagcct

SEQ ID NO: 22794 - RNA, 22 nt, synthetic construct
  source 1..22: mol_type = other RNA
agtcacatggaatgaattgcag

SEQ ID NO: 22795 - RNA, 22 nt, synthetic construct
  source 1..22: mol_type = other RNA
agtcagaagaaaactgcttttt

SEQ ID NO: 22796 - RNA, 22 nt, synthetic construct
  source 1..22: mol_type = other RNA
agtcataccagccacttttcca

SEQ ID NO: 22797 - RNA, 22 nt, synthetic construct
  source 1..22: mol_type = other RNA
agtccaacaaaccatttttaaa

SEQ ID NO: 22798 - RNA, 22 nt, synthetic construct
  source 1..22: mol_type = other RNA
agtccaggtgatcttgactact

SEQ ID NO: 22799 - RNA, 22 nt, synthetic construct
  source 1..22: mol_type = other RNA
agtccggggctacagctatact

SEQ ID NO: 22800 - RNA, 22 nt, synthetic construct
  source 1..22: mol_type = other RNA
agtctatccagggaccttatgc

SEQ ID NO: 22801 - RNA, 22 nt, synthetic construct
  source 1..22: mol_type = other RNA
agtgaaaaatgaaaaagctgtt

SEQ ID NO: 22802 - RNA, 22 nt, synthetic construct
  source 1..22: mol_type = other RNA
agtgaaaacttgtaggacagaa

SEQ ID NO: 22803 - RNA, 22 nt, synthetic construct
  source 1..22: mol_type = other RNA
agtgaaagcaagcgttaatgag

SEQ ID NO: 22804 - RNA, 22 nt, synthetic construct
  source 1..22: mol_type = other RNA
agtgagagttgctaagatgcct

SEQ ID NO: 22805 - RNA, 22 nt, synthetic construct
  source 1..22: mol_type = other RNA
agtgagcgacatgtaaatgtct

SEQ ID NO: 22806 - RNA, 22 nt, synthetic construct
  source 1..22: mol_type = other RNA
agtgctatgtctgaatactaga

SEQ ID NO: 22807 - RNA, 22 nt, synthetic construct
  source 1..22: mol_type = other RNA
agtgcttccctccctcaccctc

SEQ ID NO: 22808 - RNA, 22 nt, synthetic construct
  source 1..22: mol_type = other RNA
agtgcttttattcctccctagt

SEQ ID NO: 22809 - RNA, 22 nt, synthetic construct
  source 1..22: mol_type = other RNA
agtggctggtatgactaaagaa

SEQ ID NO: 22810 - RNA, 22 nt, synthetic construct
  source 1..22: mol_type = other RNA
agtgtagcatcaggttaaatct

SEQ ID NO: 22811 - RNA, 22 nt, synthetic construct
  source 1..22: mol_type = other RNA
agtgtcttgtactcctgagctc

SEQ ID NO: 22812 - RNA, 22 nt, synthetic construct
  source 1..22: mol_type = other RNA
agtgttatcttttgatccatct

SEQ ID NO: 22813 - RNA, 22 nt, synthetic construct
  source 1..22: mol_type = other RNA
agtgtttccaggaagtgaaaac

SEQ ID NO: 22814 - RNA, 22 nt, synthetic construct
  source 1..22: mol_type = other RNA
agttaaatgaaatgtaatgggc

SEQ ID NO: 22815 - RNA, 22 nt, synthetic construct
  source 1..22: mol_type = other RNA
agttaaggtaatttaaatcagc

SEQ ID NO: 22816 - RNA, 22 nt, synthetic construct
  source 1..22: mol_type = other RNA
agttacccaaatcatagagacg

SEQ ID NO: 22817 - RNA, 22 nt, synthetic construct
  source 1..22: mol_type = other RNA
agttactaactggtaagaacag

SEQ ID NO: 22818 - RNA, 22 nt, synthetic construct
  source 1..22: mol_type = other RNA
agttagtaactgatctcagatg

SEQ ID NO: 22819 - RNA, 22 nt, synthetic construct
  source 1..22: mol_type = other RNA
agttcacgttcttaaatgttta

SEQ ID NO: 22820 - RNA, 22 nt, synthetic construct
  source 1..22: mol_type = other RNA
agttctgatatatttaactatg

SEQ ID NO: 22821 - RNA, 22 nt, synthetic construct
  source 1..22: mol_type = other RNA
agttcttgcagtgtggcccagg

SEQ ID NO: 22822 - RNA, 22 nt, synthetic construct
  source 1..22: mol_type = other RNA
agttctttagtcataccagcca

SEQ ID NO: 22823 - RNA, 22 nt, synthetic construct
  source 1..22: mol_type = other RNA
agttgctaagatgcctggtagg

SEQ ID NO: 22824 - RNA, 22 nt, synthetic construct
  source 1..22: mol_type = other RNA
agttggctagacatcagagtat

SEQ ID NO: 22825 - RNA, 22 nt, synthetic construct
  source 1..22: mol_type = other RNA
agttgtctaacccgcgggccgc

SEQ ID NO: 22826 - RNA, 22 nt, synthetic construct
  source 1..22: mol_type = other RNA
agtttaatggaatctcacctcc

SEQ ID NO: 22827 - RNA, 22 nt, synthetic construct
  source 1..22: mol_type = other RNA
agtttcacctgtcattttcatg

SEQ ID NO: 22828 - RNA, 22 nt, synthetic construct
  source 1..22: mol_type = other RNA
agtttgggtcatagaacaacag

SEQ ID NO: 22829 - RNA, 22 nt, synthetic construct
  source 1..22: mol_type = other RNA
agtttgtactgcgtgggtcata

SEQ ID NO: 22830 - RNA, 22 nt, synthetic construct
  source 1..22: mol_type = other RNA
agttttataccatttgagaccc

SEQ ID NO: 22831 - RNA, 22 nt, synthetic construct
  source 1..22: mol_type = other RNA
agttttatcctgaggaattata

SEQ ID NO: 22832 - RNA, 22 nt, synthetic construct
  source 1..22: mol_type = other RNA
agttttcacttcctggaaacac

SEQ ID NO: 22833 - RNA, 22 nt, synthetic construct
  source 1..22: mol_type = other RNA
agttttcttctgactcctgagc

SEQ ID NO: 22834 - RNA, 22 nt, synthetic construct
  source 1..22: mol_type = other RNA
ataaaaagcatttggtgttaaa

SEQ ID NO: 22835 - RNA, 22 nt, synthetic construct
  source 1..22: mol_type = other RNA
ataaaaattcagttctttagtc

SEQ ID NO: 22836 - RNA, 22 nt, synthetic construct
  source 1..22: mol_type = other RNA
ataaaactcaggtgatcatgct

SEQ ID NO: 22837 - RNA, 22 nt, synthetic construct
  source 1..22: mol_type = other RNA
ataaaagcactgctgggtaaga

SEQ ID NO: 22838 - RNA, 22 nt, synthetic construct
  source 1..22: mol_type = other RNA
ataaaagctgaagctctctggc

SEQ ID NO: 22839 - RNA, 22 nt, synthetic construct
  source 1..22: mol_type = other RNA
ataaacatttaagaacgtgaac

SEQ ID NO: 22840 - RNA, 22 nt, synthetic construct
  source 1..22: mol_type = other RNA
ataaagacatttacatgtcgct

SEQ ID NO: 22841 - RNA, 22 nt, synthetic construct
  source 1..22: mol_type = other RNA
ataaagcatgatcacctgagtt

SEQ ID NO: 22842 - RNA, 22 nt, synthetic construct
  source 1..22: mol_type = other RNA
ataacactaaagacagagacag

SEQ ID NO: 22843 - RNA, 22 nt, synthetic construct
  source 1..22: mol_type = other RNA
ataactcaagatatgatgctta

SEQ ID NO: 22844 - RNA, 22 nt, synthetic construct
  source 1..22: mol_type = other RNA
ataaggtccctggatagacttt

SEQ ID NO: 22845 - RNA, 22 nt, synthetic construct
  source 1..22: mol_type = other RNA
ataagtagtgataatccgcagt

SEQ ID NO: 22846 - RNA, 22 nt, synthetic construct
  source 1..22: mol_type = other RNA
ataataccaacattttaacacc

SEQ ID NO: 22847 - RNA, 22 nt, synthetic construct
  source 1..22: mol_type = other RNA
ataatgaattttagggaggtga

SEQ ID NO: 22848 - RNA, 22 nt, synthetic construct
  source 1..22: mol_type = other RNA
ataattcctcaggataaaactt

SEQ ID NO: 22849 - RNA, 22 nt, synthetic construct
  source 1..22: mol_type = other RNA
atacaaatgaacccagcctaaa

SEQ ID NO: 22850 - RNA, 22 nt, synthetic construct
  source 1..22: mol_type = other RNA
ataccaacattttaacaccaaa

SEQ ID NO: 22851 - RNA, 22 nt, synthetic construct
  source 1..22: mol_type = other RNA
ataccagccacttttccaatgc

SEQ ID NO: 22852 - RNA, 22 nt, synthetic construct
  source 1..22: mol_type = other RNA
ataccatttgagacccttgctg

SEQ ID NO: 22853 - RNA, 22 nt, synthetic construct
  source 1..22: mol_type = other RNA
atacctctcatttctgttctta

SEQ ID NO: 22854 - RNA, 22 nt, synthetic construct
  source 1..22: mol_type = other RNA
atacgtggacattgatggtttt

SEQ ID NO: 22855 - RNA, 22 nt, synthetic construct
  source 1..22: mol_type = other RNA
atactacacacacaaatatgac

SEQ ID NO: 22856 - RNA, 22 nt, synthetic construct
  source 1..22: mol_type = other RNA
atactagaggagcaagtacaac

SEQ ID NO: 22857 - RNA, 22 nt, synthetic construct
  source 1..22: mol_type = other RNA
atactaggagctcaggagtaca

SEQ ID NO: 22858 - RNA, 22 nt, synthetic construct
  source 1..22: mol_type = other RNA
atactctgatgtctagccaact

SEQ ID NO: 22859 - RNA, 22 nt, synthetic construct
  source 1..22: mol_type = other RNA
atactgtccacagttgcaattc

SEQ ID NO: 22860 - RNA, 22 nt, synthetic construct
  source 1..22: mol_type = other RNA
atacttgatcccattttccatt

SEQ ID NO: 22861 - RNA, 22 nt, synthetic construct
  source 1..22: mol_type = other RNA
atagaacaacagaccatggaag

SEQ ID NO: 22862 - RNA, 22 nt, synthetic construct
  source 1..22: mol_type = other RNA
atagactttcctcaatttaaca

SEQ ID NO: 22863 - RNA, 22 nt, synthetic construct
  source 1..22: mol_type = other RNA
atagagacgtcatatatctttg

SEQ ID NO: 22864 - RNA, 22 nt, synthetic construct
  source 1..22: mol_type = other RNA
atagagcatgaaaatgacaggt

SEQ ID NO: 22865 - RNA, 22 nt, synthetic construct
  source 1..22: mol_type = other RNA
atagcactagctttctccctct

SEQ ID NO: 22866 - RNA, 22 nt, synthetic construct
  source 1..22: mol_type = other RNA
atagctgtagccccggacttgt

SEQ ID NO: 22867 - RNA, 22 nt, synthetic construct
  source 1..22: mol_type = other RNA
atagcttccaaattgctgtctc

SEQ ID NO: 22868 - RNA, 22 nt, synthetic construct
  source 1..22: mol_type = other RNA
ataggtctgtgtgatacaaatg

SEQ ID NO: 22869 - RNA, 22 nt, synthetic construct
  source 1..22: mol_type = other RNA
atagtaattctggggttgttgt

SEQ ID NO: 22870 - RNA, 22 nt, synthetic construct
  source 1..22: mol_type = other RNA
atagtgtcttgtactcctgagc

SEQ ID NO: 22871 - RNA, 22 nt, synthetic construct
  source 1..22: mol_type = other RNA
atagttaaggtaatttaaatca

SEQ ID NO: 22872 - RNA, 22 nt, synthetic construct
  source 1..22: mol_type = other RNA
atatatcagaacttgaatgaag

SEQ ID NO: 22873 - RNA, 22 nt, synthetic construct
  source 1..22: mol_type = other RNA
atatatctttgtggggtggttc

SEQ ID NO: 22874 - RNA, 22 nt, synthetic construct
  source 1..22: mol_type = other RNA
atatatgacgtctctatgattt

SEQ ID NO: 22875 - RNA, 22 nt, synthetic construct
  source 1..22: mol_type = other RNA
atatatttaactatgtagctcc

SEQ ID NO: 22876 - RNA, 22 nt, synthetic construct
  source 1..22: mol_type = other RNA
atatatttagctgaaagctaag

SEQ ID NO: 22877 - RNA, 22 nt, synthetic construct
  source 1..22: mol_type = other RNA
atatcagaacttgaatgaagaa

SEQ ID NO: 22878 - RNA, 22 nt, synthetic construct
  source 1..22: mol_type = other RNA
atatctttgtggggtggttctt

SEQ ID NO: 22879 - RNA, 22 nt, synthetic construct
  source 1..22: mol_type = other RNA
atatgacctctctcctgaagtc

SEQ ID NO: 22880 - RNA, 22 nt, synthetic construct
  source 1..22: mol_type = other RNA
atatgacgtctctatgatttgg

SEQ ID NO: 22881 - RNA, 22 nt, synthetic construct
  source 1..22: mol_type = other RNA
atatgatgcttagagctcctcc

SEQ ID NO: 22882 - RNA, 22 nt, synthetic construct
  source 1..22: mol_type = other RNA
atatgtggcccaagacagttct

SEQ ID NO: 22883 - RNA, 22 nt, synthetic construct
  source 1..22: mol_type = other RNA
atatttaactatgtagctcctg

SEQ ID NO: 22884 - RNA, 22 nt, synthetic construct
  source 1..22: mol_type = other RNA
atatttagctgaaagctaagtc

SEQ ID NO: 22885 - RNA, 22 nt, synthetic construct
  source 1..22: mol_type = other RNA
atatttgtgtgtgtagtatgtg

SEQ ID NO: 22886 - RNA, 22 nt, synthetic construct
  source 1..22: mol_type = other RNA
atcaaaagataacactaaagac

SEQ ID NO: 22887 - RNA, 22 nt, synthetic construct
  source 1..22: mol_type = other RNA
atcaagagagggagaaagctag

SEQ ID NO: 22888 - RNA, 22 nt, synthetic construct
  source 1..22: mol_type = other RNA
atcaagataaacatttaagaac

SEQ ID NO: 22889 - RNA, 22 nt, synthetic construct
  source 1..22: mol_type = other RNA
atcaagtatgagtgagagttgc

SEQ ID NO: 22890 - RNA, 22 nt, synthetic construct
  source 1..22: mol_type = other RNA
atcaagtgtttccaggaagtga

SEQ ID NO: 22891 - RNA, 22 nt, synthetic construct
  source 1..22: mol_type = other RNA
atcaatgtccacgtattctgta

SEQ ID NO: 22892 - RNA, 22 nt, synthetic construct
  source 1..22: mol_type = other RNA
atcacaaagtaagttttatcct

SEQ ID NO: 22893 - RNA, 22 nt, synthetic construct
  source 1..22: mol_type = other RNA
atcacacagacctattcttcat

SEQ ID NO: 22894 - RNA, 22 nt, synthetic construct
  source 1..22: mol_type = other RNA
atcacacaggcatctgagatca

SEQ ID NO: 22895 - RNA, 22 nt, synthetic construct
  source 1..22: mol_type = other RNA
atcacattcacgagaacagaat

SEQ ID NO: 22896 - RNA, 22 nt, synthetic construct
  source 1..22: mol_type = other RNA
atcacctgagttttataccatt

SEQ ID NO: 22897 - RNA, 22 nt, synthetic construct
  source 1..22: mol_type = other RNA
atcacctggactgtgaagacgg

SEQ ID NO: 22898 - RNA, 22 nt, synthetic construct
  source 1..22: mol_type = other RNA
atcactacttatcatttttgga

SEQ ID NO: 22899 - RNA, 22 nt, synthetic construct
  source 1..22: mol_type = other RNA
atcagaacttgaatgaagaata

SEQ ID NO: 22900 - RNA, 22 nt, synthetic construct
  source 1..22: mol_type = other RNA
atcagagtatactaggagctca

SEQ ID NO: 22901 - RNA, 22 nt, synthetic construct
  source 1..22: mol_type = other RNA
atcagcaatgacaacaacccca

SEQ ID NO: 22902 - RNA, 22 nt, synthetic construct
  source 1..22: mol_type = other RNA
atcagctgtcctttatatgtgg

SEQ ID NO: 22903 - RNA, 22 nt, synthetic construct
  source 1..22: mol_type = other RNA
atcagttactaactggtaagaa

SEQ ID NO: 22904 - RNA, 22 nt, synthetic construct
  source 1..22: mol_type = other RNA
atcatagagacgtcatatatct

SEQ ID NO: 22905 - RNA, 22 nt, synthetic construct
  source 1..22: mol_type = other RNA
atcatatcttgagttatagaaa

SEQ ID NO: 22906 - RNA, 22 nt, synthetic construct
  source 1..22: mol_type = other RNA
atcatcctaacaagatgtaaga

SEQ ID NO: 22907 - RNA, 22 nt, synthetic construct
  source 1..22: mol_type = other RNA
atcatgctttatgtctgtctct

SEQ ID NO: 22908 - RNA, 22 nt, synthetic construct
  source 1..22: mol_type = other RNA
atcatttttggagcatttttct

SEQ ID NO: 22909 - RNA, 22 nt, synthetic construct
  source 1..22: mol_type = other RNA
atccaaactcattaacgcttgc

SEQ ID NO: 22910 - RNA, 22 nt, synthetic construct
  source 1..22: mol_type = other RNA
atccaattctctgtaaagcagt

SEQ ID NO: 22911 - RNA, 22 nt, synthetic construct
  source 1..22: mol_type = other RNA
atccacagaacaagtccggggc

SEQ ID NO: 22912 - RNA, 22 nt, synthetic construct
  source 1..22: mol_type = other RNA
atccagggaccttatgcatcac

SEQ ID NO: 22913 - RNA, 22 nt, synthetic construct
  source 1..22: mol_type = other RNA
atccatcttacatcttgttagg

SEQ ID NO: 22914 - RNA, 22 nt, synthetic construct
  source 1..22: mol_type = other RNA
atcccagctaaggaaaaaggat

SEQ ID NO: 22915 - RNA, 22 nt, synthetic construct
  source 1..22: mol_type = other RNA
atcccattttccatttgttgta

SEQ ID NO: 22916 - RNA, 22 nt, synthetic construct
  source 1..22: mol_type = other RNA
atccctaccaggcatcttagca

SEQ ID NO: 22917 - RNA, 22 nt, synthetic construct
  source 1..22: mol_type = other RNA
atcctaacaagatgtaagatgg

SEQ ID NO: 22918 - RNA, 22 nt, synthetic construct
  source 1..22: mol_type = other RNA
atcctgaggaattataatacca

SEQ ID NO: 22919 - RNA, 22 nt, synthetic construct
  source 1..22: mol_type = other RNA
atcctgcagattcaaatgtcat

SEQ ID NO: 22920 - RNA, 22 nt, synthetic construct
  source 1..22: mol_type = other RNA
atcctgtaaaccaggggtgtcc

SEQ ID NO: 22921 - RNA, 22 nt, synthetic construct
  source 1..22: mol_type = other RNA
atcctttttccttagctgggat

SEQ ID NO: 22922 - RNA, 22 nt, synthetic construct
  source 1..22: mol_type = other RNA
atctaatttgaattgcaactgt

SEQ ID NO: 22923 - RNA, 22 nt, synthetic construct
  source 1..22: mol_type = other RNA
atctcacctccctaaaattcat

SEQ ID NO: 22924 - RNA, 22 nt, synthetic construct
  source 1..22: mol_type = other RNA
atctcagatgcctgtgtgatag

SEQ ID NO: 22925 - RNA, 22 nt, synthetic construct
  source 1..22: mol_type = other RNA
atctcccctttggtcatgcctt

SEQ ID NO: 22926 - RNA, 22 nt, synthetic construct
  source 1..22: mol_type = other RNA
atctccctttttcttcctctaa

SEQ ID NO: 22927 - RNA, 22 nt, synthetic construct
  source 1..22: mol_type = other RNA
atctgagatcagttactaactg

SEQ ID NO: 22928 - RNA, 22 nt, synthetic construct
  source 1..22: mol_type = other RNA
atctgaggttaggcaacatctc

SEQ ID NO: 22929 - RNA, 22 nt, synthetic construct
  source 1..22: mol_type = other RNA
atctgcaggattaaaagcagca

SEQ ID NO: 22930 - RNA, 22 nt, synthetic construct
  source 1..22: mol_type = other RNA
atctgtctggtttcgcgagaca

SEQ ID NO: 22931 - RNA, 22 nt, synthetic construct
  source 1..22: mol_type = other RNA
atcttacatcttgttaggatga

SEQ ID NO: 22932 - RNA, 22 nt, synthetic construct
  source 1..22: mol_type = other RNA
atcttagcaactctcactcata

SEQ ID NO: 22933 - RNA, 22 nt, synthetic construct
  source 1..22: mol_type = other RNA
atcttcctttaggacaatcatc

SEQ ID NO: 22934 - RNA, 22 nt, synthetic construct
  source 1..22: mol_type = other RNA
atcttgactactgctttacaga

SEQ ID NO: 22935 - RNA, 22 nt, synthetic construct
  source 1..22: mol_type = other RNA
atcttgagcattggaaaagtgg

SEQ ID NO: 22936 - RNA, 22 nt, synthetic construct
  source 1..22: mol_type = other RNA
atcttgagttatagaaaacaat

SEQ ID NO: 22937 - RNA, 22 nt, synthetic construct
  source 1..22: mol_type = other RNA
atcttgggtagcctggtgtctc

SEQ ID NO: 22938 - RNA, 22 nt, synthetic construct
  source 1..22: mol_type = other RNA
atcttgttaggatgattgtcct

SEQ ID NO: 22939 - RNA, 22 nt, synthetic construct
  source 1..22: mol_type = other RNA
atctttaaaaatggtttgttgg

SEQ ID NO: 22940 - RNA, 22 nt, synthetic construct
  source 1..22: mol_type = other RNA
atctttcggcttccctgggcca

SEQ ID NO: 22941 - RNA, 22 nt, synthetic construct
  source 1..22: mol_type = other RNA
atctttgtggggtggttctttt

SEQ ID NO: 22942 - RNA, 22 nt, synthetic construct
  source 1..22: mol_type = other RNA
atcttttgatccatcttacatc

SEQ ID NO: 22943 - RNA, 22 nt, synthetic construct
  source 1..22: mol_type = other RNA
atgaaaaagctgttaaattgag

SEQ ID NO: 22944 - RNA, 22 nt, synthetic construct
  source 1..22: mol_type = other RNA
atgaaaatgacaggtgaaactc

SEQ ID NO: 22945 - RNA, 22 nt, synthetic construct
  source 1..22: mol_type = other RNA
atgaaatgtaatgggccagaga

SEQ ID NO: 22946 - RNA, 22 nt, synthetic construct
  source 1..22: mol_type = other RNA
atgaacccagcctaaatttctg

SEQ ID NO: 22947 - RNA, 22 nt, synthetic construct
  source 1..22: mol_type = other RNA
atgaagaataggtctgtgtgat

SEQ ID NO: 22948 - RNA, 22 nt, synthetic construct
  source 1..22: mol_type = other RNA
atgaattctgttctcgtgaatg

SEQ ID NO: 22949 - RNA, 22 nt, synthetic construct
  source 1..22: mol_type = other RNA
atgaattgcagttacccaaatc

SEQ ID NO: 22950 - RNA, 22 nt, synthetic construct
  source 1..22: mol_type = other RNA
atgaattttagggaggtgagat

SEQ ID NO: 22951 - RNA, 22 nt, synthetic construct
  source 1..22: mol_type = other RNA
atgacaacaaccccagaattac

SEQ ID NO: 22952 - RNA, 22 nt, synthetic construct
  source 1..22: mol_type = other RNA
atgacaggtgaaactccattac

SEQ ID NO: 22953 - RNA, 22 nt, synthetic construct
  source 1..22: mol_type = other RNA
atgacatttgaatctgcaggat

SEQ ID NO: 22954 - RNA, 22 nt, synthetic construct
  source 1..22: mol_type = other RNA
atgaccaaaggggagatgacat

SEQ ID NO: 22955 - RNA, 22 nt, synthetic construct
  source 1..22: mol_type = other RNA
atgacccaaactgcccttttaa

SEQ ID NO: 22956 - RNA, 22 nt, synthetic construct
  source 1..22: mol_type = other RNA
atgacccacgcagtacaaactg

SEQ ID NO: 22957 - RNA, 22 nt, synthetic construct
  source 1..22: mol_type = other RNA
atgacctctctcctgaagtcac

SEQ ID NO: 22958 - RNA, 22 nt, synthetic construct
  source 1..22: mol_type = other RNA
atgacgtctctatgatttgggt

SEQ ID NO: 22959 - RNA, 22 nt, synthetic construct
  source 1..22: mol_type = other RNA
atgagaggtatttagaggaaga

SEQ ID NO: 22960 - RNA, 22 nt, synthetic construct
  source 1..22: mol_type = other RNA
atgagtgagagttgctaagatg

SEQ ID NO: 22961 - RNA, 22 nt, synthetic construct
  source 1..22: mol_type = other RNA
atgataagtagtgataatccgc

SEQ ID NO: 22962 - RNA, 22 nt, synthetic construct
  source 1..22: mol_type = other RNA
atgatcacctgagttttatacc

SEQ ID NO: 22963 - RNA, 22 nt, synthetic construct
  source 1..22: mol_type = other RNA
atgatgcttagagctcctccaa

SEQ ID NO: 22964 - RNA, 22 nt, synthetic construct
  source 1..22: mol_type = other RNA
atgattgtcctaaaggaagata

SEQ ID NO: 22965 - RNA, 22 nt, synthetic construct
  source 1..22: mol_type = other RNA
atgatttgggtaactgcaattc

SEQ ID NO: 22966 - RNA, 22 nt, synthetic construct
  source 1..22: mol_type = other RNA
atgcaaaggggtagagagcctg

SEQ ID NO: 22967 - RNA, 22 nt, synthetic construct
  source 1..22: mol_type = other RNA
atgcataaggtccctggataga

SEQ ID NO: 22968 - RNA, 22 nt, synthetic construct
  source 1..22: mol_type = other RNA
atgcataatgaattttagggag

SEQ ID NO: 22969 - RNA, 22 nt, synthetic construct
  source 1..22: mol_type = other RNA
atgcatcacattcacgagaaca

SEQ ID NO: 22970 - RNA, 22 nt, synthetic construct
  source 1..22: mol_type = other RNA
atgcctggtagggatgcaaagg

SEQ ID NO: 22971 - RNA, 22 nt, synthetic construct
  source 1..22: mol_type = other RNA
atgcctgtgtgatagcttccaa

SEQ ID NO: 22972 - RNA, 22 nt, synthetic construct
  source 1..22: mol_type = other RNA
atgccttccatggtctgttgtt

SEQ ID NO: 22973 - RNA, 22 nt, synthetic construct
  source 1..22: mol_type = other RNA
atgcggcccgcgggttagacaa

SEQ ID NO: 22974 - RNA, 22 nt, synthetic construct
  source 1..22: mol_type = other RNA
atgctacactttggtggtgcag

SEQ ID NO: 22975 - RNA, 22 nt, synthetic construct
  source 1..22: mol_type = other RNA
atgctacccttgctgcttttaa

SEQ ID NO: 22976 - RNA, 22 nt, synthetic construct
  source 1..22: mol_type = other RNA
atgctcaagattaataaaatgt

SEQ ID NO: 22977 - RNA, 22 nt, synthetic construct
  source 1..22: mol_type = other RNA
atgctccaaaaatgataagtag

SEQ ID NO: 22978 - RNA, 22 nt, synthetic construct
  source 1..22: mol_type = other RNA
atgctctatcttcctttaggac

SEQ ID NO: 22979 - RNA, 22 nt, synthetic construct
  source 1..22: mol_type = other RNA
atgcttagagctcctccaatca

SEQ ID NO: 22980 - RNA, 22 nt, synthetic construct
  source 1..22: mol_type = other RNA
atgctttatgtctgtctctaga

SEQ ID NO: 22981 - RNA, 22 nt, synthetic construct
  source 1..22: mol_type = other RNA
atggaaaatgggatcaagtatg

SEQ ID NO: 22982 - RNA, 22 nt, synthetic construct
  source 1..22: mol_type = other RNA
atggaaggcatgaccaaagggg

SEQ ID NO: 22983 - RNA, 22 nt, synthetic construct
  source 1..22: mol_type = other RNA
atggaatctcacctccctaaaa

SEQ ID NO: 22984 - RNA, 22 nt, synthetic construct
  source 1..22: mol_type = other RNA
atggaatgaattgcagttaccc

SEQ ID NO: 22985 - RNA, 22 nt, synthetic construct
  source 1..22: mol_type = other RNA
atggagtgagcgacatgtaaat

SEQ ID NO: 22986 - RNA, 22 nt, synthetic construct
  source 1..22: mol_type = other RNA
atggagtttcacctgtcatttt

SEQ ID NO: 22987 - RNA, 22 nt, synthetic construct
  source 1..22: mol_type = other RNA
atggatcaaaagataacactaa

SEQ ID NO: 22988 - RNA, 22 nt, synthetic construct
  source 1..22: mol_type = other RNA
atgggacccaggacagctttga

SEQ ID NO: 22989 - RNA, 22 nt, synthetic construct
  source 1..22: mol_type = other RNA
atgggatcaagtatgagtgaga

SEQ ID NO: 22990 - RNA, 22 nt, synthetic construct
  source 1..22: mol_type = other RNA
atgggccagagagcttcagctt

SEQ ID NO: 22991 - RNA, 22 nt, synthetic construct
  source 1..22: mol_type = other RNA
atggtataaaactcaggtgatc

SEQ ID NO: 22992 - RNA, 22 nt, synthetic construct
  source 1..22: mol_type = other RNA
atggtctgttgttctatgaccc

SEQ ID NO: 22993 - RNA, 22 nt, synthetic construct
  source 1..22: mol_type = other RNA
atggtttgacattttattaatc

SEQ ID NO: 22994 - RNA, 22 nt, synthetic construct
  source 1..22: mol_type = other RNA
atggtttgttggacttagcttt

SEQ ID NO: 22995 - RNA, 22 nt, synthetic construct
  source 1..22: mol_type = other RNA
atggttttctctttttactgag

SEQ ID NO: 22996 - RNA, 22 nt, synthetic construct
  source 1..22: mol_type = other RNA
atgtaagatggatcaaaagata

SEQ ID NO: 22997 - RNA, 22 nt, synthetic construct
  source 1..22: mol_type = other RNA
atgtaatgggccagagagcttc

SEQ ID NO: 22998 - RNA, 22 nt, synthetic construct
  source 1..22: mol_type = other RNA
atgtagctcctgtaacagttta

SEQ ID NO: 22999 - RNA, 22 nt, synthetic construct
  source 1..22: mol_type = other RNA
atgtcaaaccataaagacattt

SEQ ID NO: 23000 - RNA, 22 nt, synthetic construct
  source 1..22: mol_type = other RNA
atgtcatctcccctttggtcat

SEQ ID NO: 23001 - RNA, 22 nt, synthetic construct
  source 1..22: mol_type = other RNA
atgtccacgtattctgtaatcc

SEQ ID NO: 23002 - RNA, 22 nt, synthetic construct
  source 1..22: mol_type = other RNA
atgtcgctcactccatttactt

SEQ ID NO: 23003 - RNA, 22 nt, synthetic construct
  source 1..22: mol_type = other RNA
atgtctagccaactttaagtaa

SEQ ID NO: 23004 - RNA, 22 nt, synthetic construct
  source 1..22: mol_type = other RNA
atgtctgaatactagaggagca

SEQ ID NO: 23005 - RNA, 22 nt, synthetic construct
  source 1..22: mol_type = other RNA
atgtctgtctctagaaaaatgc

SEQ ID NO: 23006 - RNA, 22 nt, synthetic construct
  source 1..22: mol_type = other RNA
atgtgacttcaggagagaggtc

SEQ ID NO: 23007 - RNA, 22 nt, synthetic construct
  source 1..22: mol_type = other RNA
atgtgatgcataaggtccctgg

SEQ ID NO: 23008 - RNA, 22 nt, synthetic construct
  source 1..22: mol_type = other RNA
atgtgcctgccttggacaacag

SEQ ID NO: 23009 - RNA, 22 nt, synthetic construct
  source 1..22: mol_type = other RNA
atgtggaaaatagtgaaaaatg

SEQ ID NO: 23010 - RNA, 22 nt, synthetic construct
  source 1..22: mol_type = other RNA
atgtggcccaagacagttcttg

SEQ ID NO: 23011 - RNA, 22 nt, synthetic construct
  source 1..22: mol_type = other RNA
atgttgcctaacctcagatcca

SEQ ID NO: 23012 - RNA, 22 nt, synthetic construct
  source 1..22: mol_type = other RNA
atgttggtattataattcctca

SEQ ID NO: 23013 - RNA, 22 nt, synthetic construct
  source 1..22: mol_type = other RNA
attaaaagcagcaagggtagca

SEQ ID NO: 23014 - RNA, 22 nt, synthetic construct
  source 1..22: mol_type = other RNA
attaaactgttacaggagctac

SEQ ID NO: 23015 - RNA, 22 nt, synthetic construct
  source 1..22: mol_type = other RNA
attaacgcttgctttcactgtt

SEQ ID NO: 23016 - RNA, 22 nt, synthetic construct
  source 1..22: mol_type = other RNA
attaagatttaacctgatgcta

SEQ ID NO: 23017 - RNA, 22 nt, synthetic construct
  source 1..22: mol_type = other RNA
attaaggcttgagctggggctt

SEQ ID NO: 23018 - RNA, 22 nt, synthetic construct
  source 1..22: mol_type = other RNA
attaatcttgagcattggaaaa

SEQ ID NO: 23019 - RNA, 22 nt, synthetic construct
  source 1..22: mol_type = other RNA
attacagaatacgtggacattg

SEQ ID NO: 23020 - RNA, 22 nt, synthetic construct
  source 1..22: mol_type = other RNA
attaccttaactattctgagct

SEQ ID NO: 23021 - RNA, 22 nt, synthetic construct
  source 1..22: mol_type = other RNA
attactatgacccacgcagtac

SEQ ID NO: 23022 - RNA, 22 nt, synthetic construct
  source 1..22: mol_type = other RNA
attactggcttgtactgtttac

SEQ ID NO: 23023 - RNA, 22 nt, synthetic construct
  source 1..22: mol_type = other RNA
attatatatttagctgaaagct

SEQ ID NO: 23024 - RNA, 22 nt, synthetic construct
  source 1..22: mol_type = other RNA
attatcactacttatcattttt

SEQ ID NO: 23025 - RNA, 22 nt, synthetic construct
  source 1..22: mol_type = other RNA
attcaaagctgtcctgggtccc

SEQ ID NO: 23026 - RNA, 22 nt, synthetic construct
  source 1..22: mol_type = other RNA
attcaaatgtcatctccccttt

SEQ ID NO: 23027 - RNA, 22 nt, synthetic construct
  source 1..22: mol_type = other RNA
attcacgagaacagaattcatc

SEQ ID NO: 23028 - RNA, 22 nt, synthetic construct
  source 1..22: mol_type = other RNA
attcagacatagcactagcttt

SEQ ID NO: 23029 - RNA, 22 nt, synthetic construct
  source 1..22: mol_type = other RNA
attcagttctttagtcatacca

SEQ ID NO: 23030 - RNA, 22 nt, synthetic construct
  source 1..22: mol_type = other RNA
attcatcctgtaaaccaggggt

SEQ ID NO: 23031 - RNA, 22 nt, synthetic construct
  source 1..22: mol_type = other RNA
attcattccatgtgacttcagg

SEQ ID NO: 23032 - RNA, 22 nt, synthetic construct
  source 1..22: mol_type = other RNA
attccaaaaagaaccaccccac

SEQ ID NO: 23033 - RNA, 22 nt, synthetic construct
  source 1..22: mol_type = other RNA
attccatgtgacttcaggagag

SEQ ID NO: 23034 - RNA, 22 nt, synthetic construct
  source 1..22: mol_type = other RNA
attccattaaactgttacagga

SEQ ID NO: 23035 - RNA, 22 nt, synthetic construct
  source 1..22: mol_type = other RNA
attcctcaggataaaacttact

SEQ ID NO: 23036 - RNA, 22 nt, synthetic construct
  source 1..22: mol_type = other RNA
attcctccctagttcacgttct

SEQ ID NO: 23037 - RNA, 22 nt, synthetic construct
  source 1..22: mol_type = other RNA
attccttcaaaaagctcagaat

SEQ ID NO: 23038 - RNA, 22 nt, synthetic construct
  source 1..22: mol_type = other RNA
attcgtaaactttcttaaagtt

SEQ ID NO: 23039 - RNA, 22 nt, synthetic construct
  source 1..22: mol_type = other RNA
attctctgtaaagcagtagtca

SEQ ID NO: 23040 - RNA, 22 nt, synthetic construct
  source 1..22: mol_type = other RNA
attctgagctttttgaaggaat

SEQ ID NO: 23041 - RNA, 22 nt, synthetic construct
  source 1..22: mol_type = other RNA
attctggggttgttgtcattgc

SEQ ID NO: 23042 - RNA, 22 nt, synthetic construct
  source 1..22: mol_type = other RNA
attctgtaatccacagaacaag

SEQ ID NO: 23043 - RNA, 22 nt, synthetic construct
  source 1..22: mol_type = other RNA
attctgtccctgaccgtcttca

SEQ ID NO: 23044 - RNA, 22 nt, synthetic construct
  source 1..22: mol_type = other RNA
attctgttctcgtgaatgtgat

SEQ ID NO: 23045 - RNA, 22 nt, synthetic construct
  source 1..22: mol_type = other RNA
attgaggaaagtctatccaggg

SEQ ID NO: 23046 - RNA, 22 nt, synthetic construct
  source 1..22: mol_type = other RNA
attgatggttttctctttttac

SEQ ID NO: 23047 - RNA, 22 nt, synthetic construct
  source 1..22: mol_type = other RNA
attgcaactgtggacagtatag

SEQ ID NO: 23048 - RNA, 22 nt, synthetic construct
  source 1..22: mol_type = other RNA
attgcagttacccaaatcatag

SEQ ID NO: 23049 - RNA, 22 nt, synthetic construct
  source 1..22: mol_type = other RNA
attgctgtctctgtctttagtg

SEQ ID NO: 23050 - RNA, 22 nt, synthetic construct
  source 1..22: mol_type = other RNA
attggaaaagtggctggtatga

SEQ ID NO: 23051 - RNA, 22 nt, synthetic construct
  source 1..22: mol_type = other RNA
attggacacccctggtttacag

SEQ ID NO: 23052 - RNA, 22 nt, synthetic construct
  source 1..22: mol_type = other RNA
attggaggagctctaagcatca

SEQ ID NO: 23053 - RNA, 22 nt, synthetic construct
  source 1..22: mol_type = other RNA
attggatctgaggttaggcaac

SEQ ID NO: 23054 - RNA, 22 nt, synthetic construct
  source 1..22: mol_type = other RNA
attggttccaccacaaattaag

SEQ ID NO: 23055 - RNA, 22 nt, synthetic construct
  source 1..22: mol_type = other RNA
attgtcctaaaggaagatagag

SEQ ID NO: 23056 - RNA, 22 nt, synthetic construct
  source 1..22: mol_type = other RNA
attgttttctataactcaagat

SEQ ID NO: 23057 - RNA, 22 nt, synthetic construct
  source 1..22: mol_type = other RNA
atttaaatcagcaatgacaaca

SEQ ID NO: 23058 - RNA, 22 nt, synthetic construct
  source 1..22: mol_type = other RNA
atttaacctgatgctacacttt

SEQ ID NO: 23059 - RNA, 22 nt, synthetic construct
  source 1..22: mol_type = other RNA
atttaactatgtagctcctgta

SEQ ID NO: 23060 - RNA, 22 nt, synthetic construct
  source 1..22: mol_type = other RNA
atttaagaacgtgaactaggga

SEQ ID NO: 23061 - RNA, 22 nt, synthetic construct
  source 1..22: mol_type = other RNA
atttacatgtcgctcactccat

SEQ ID NO: 23062 - RNA, 22 nt, synthetic construct
  source 1..22: mol_type = other RNA
atttacttaaagttggctagac

SEQ ID NO: 23063 - RNA, 22 nt, synthetic construct
  source 1..22: mol_type = other RNA
atttagaggaagaaaaagggag

SEQ ID NO: 23064 - RNA, 22 nt, synthetic construct
  source 1..22: mol_type = other RNA
atttagctgaaagctaagtcca

SEQ ID NO: 23065 - RNA, 22 nt, synthetic construct
  source 1..22: mol_type = other RNA
atttaggctgggttcatttgta

SEQ ID NO: 23066 - RNA, 22 nt, synthetic construct
  source 1..22: mol_type = other RNA
atttccttactgctcagtaaaa

SEQ ID NO: 23067 - RNA, 22 nt, synthetic construct
  source 1..22: mol_type = other RNA
atttctgtcctacaagttttca

SEQ ID NO: 23068 - RNA, 22 nt, synthetic construct
  source 1..22: mol_type = other RNA
atttctgttcttaccagttagt

SEQ ID NO: 23069 - RNA, 22 nt, synthetic construct
  source 1..22: mol_type = other RNA
atttgaatctgcaggattaaaa

SEQ ID NO: 23070 - RNA, 22 nt, synthetic construct
  source 1..22: mol_type = other RNA
atttgaattgcaactgtggaca

SEQ ID NO: 23071 - RNA, 22 nt, synthetic construct
  source 1..22: mol_type = other RNA
atttgagacccttgctgcacca

SEQ ID NO: 23072 - RNA, 22 nt, synthetic construct
  source 1..22: mol_type = other RNA
atttggaagctatcacacaggc

SEQ ID NO: 23073 - RNA, 22 nt, synthetic construct
  source 1..22: mol_type = other RNA
atttgggtaactgcaattcatt

SEQ ID NO: 23074 - RNA, 22 nt, synthetic construct
  source 1..22: mol_type = other RNA
atttgtatcacacagacctatt

SEQ ID NO: 23075 - RNA, 22 nt, synthetic construct
  source 1..22: mol_type = other RNA
atttgtggtggaaccaatctgt

SEQ ID NO: 23076 - RNA, 22 nt, synthetic construct
  source 1..22: mol_type = other RNA
atttgtgtgtgtagtatgtgga

SEQ ID NO: 23077 - RNA, 22 nt, synthetic construct
  source 1..22: mol_type = other RNA
atttgttgtacttgctcctcta

SEQ ID NO: 23078 - RNA, 22 nt, synthetic construct
  source 1..22: mol_type = other RNA
attttagcttttgcttgagaaa

SEQ ID NO: 23079 - RNA, 22 nt, synthetic construct
  source 1..22: mol_type = other RNA
attttagggaggtgagattcca

SEQ ID NO: 23080 - RNA, 22 nt, synthetic construct
  source 1..22: mol_type = other RNA
attttatcctttttccttagct

SEQ ID NO: 23081 - RNA, 22 nt, synthetic construct
  source 1..22: mol_type = other RNA
attttattaatcttgagcattg

SEQ ID NO: 23082 - RNA, 22 nt, synthetic construct
  source 1..22: mol_type = other RNA
attttcatgctctatcttcctt

SEQ ID NO: 23083 - RNA, 22 nt, synthetic construct
  source 1..22: mol_type = other RNA
attttcattttatcctttttcc

SEQ ID NO: 23084 - RNA, 22 nt, synthetic construct
  source 1..22: mol_type = other RNA
attttccacatactacacacac

SEQ ID NO: 23085 - RNA, 22 nt, synthetic construct
  source 1..22: mol_type = other RNA
attttccatttgttgtacttgc

SEQ ID NO: 23086 - RNA, 22 nt, synthetic construct
  source 1..22: mol_type = other RNA
atttttaaagatgtgcctgcct

SEQ ID NO: 23087 - RNA, 22 nt, synthetic construct
  source 1..22: mol_type = other RNA
atttttcactattttccacata

SEQ ID NO: 23088 - RNA, 22 nt, synthetic construct
  source 1..22: mol_type = other RNA
atttttctagagacagacataa

SEQ ID NO: 23089 - RNA, 22 nt, synthetic construct
  source 1..22: mol_type = other RNA
atttttggagcatttttctaga

SEQ ID NO: 23090 - RNA, 22 nt, synthetic construct
  source 1..22: mol_type = other RNA
caaaaagaaccaccccacaaag

SEQ ID NO: 23091 - RNA, 22 nt, synthetic construct
  source 1..22: mol_type = other RNA
caaaaagctcagaatagttaag

SEQ ID NO: 23092 - RNA, 22 nt, synthetic construct
  source 1..22: mol_type = other RNA
caaaaatgataagtagtgataa

SEQ ID NO: 23093 - RNA, 22 nt, synthetic construct
  source 1..22: mol_type = other RNA
caaaacaagcagttaaatgaaa

SEQ ID NO: 23094 - RNA, 22 nt, synthetic construct
  source 1..22: mol_type = other RNA
caaaagataacactaaagacag

SEQ ID NO: 23095 - RNA, 22 nt, synthetic construct
  source 1..22: mol_type = other RNA
caaaccataaagacatttacat

SEQ ID NO: 23096 - RNA, 22 nt, synthetic construct
  source 1..22: mol_type = other RNA
caaaccatttttaaagatgtgc

SEQ ID NO: 23097 - RNA, 22 nt, synthetic construct
  source 1..22: mol_type = other RNA
caaactcattaacgcttgcttt

SEQ ID NO: 23098 - RNA, 22 nt, synthetic construct
  source 1..22: mol_type = other RNA
caaactgcccttttaaaaaagc

SEQ ID NO: 23099 - RNA, 22 nt, synthetic construct
  source 1..22: mol_type = other RNA
caaactgctcaggagtcagaag

SEQ ID NO: 23100 - RNA, 22 nt, synthetic construct
  source 1..22: mol_type = other RNA
caaagatatatgacgtctctat

SEQ ID NO: 23101 - RNA, 22 nt, synthetic construct
  source 1..22: mol_type = other RNA
caaagctgtcctgggtcccatg

SEQ ID NO: 23102 - RNA, 22 nt, synthetic construct
  source 1..22: mol_type = other RNA
caaaggggagatgacatttgaa

SEQ ID NO: 23103 - RNA, 22 nt, synthetic construct
  source 1..22: mol_type = other RNA
caaaggggtagagagcctgggg

SEQ ID NO: 23104 - RNA, 22 nt, synthetic construct
  source 1..22: mol_type = other RNA
caaagtaagttttatcctgagg

SEQ ID NO: 23105 - RNA, 22 nt, synthetic construct
  source 1..22: mol_type = other RNA
caaagtgtagcatcaggttaaa

SEQ ID NO: 23106 - RNA, 22 nt, synthetic construct
  source 1..22: mol_type = other RNA
caaatatgacctctctcctgaa

SEQ ID NO: 23107 - RNA, 22 nt, synthetic construct
  source 1..22: mol_type = other RNA
caaatcatagagacgtcatata

SEQ ID NO: 23108 - RNA, 22 nt, synthetic construct
  source 1..22: mol_type = other RNA
caaatgaacccagcctaaattt

SEQ ID NO: 23109 - RNA, 22 nt, synthetic construct
  source 1..22: mol_type = other RNA
caaatggaaaatgggatcaagt

SEQ ID NO: 23110 - RNA, 22 nt, synthetic construct
  source 1..22: mol_type = other RNA
caaatggtataaaactcaggtg

SEQ ID NO: 23111 - RNA, 22 nt, synthetic construct
  source 1..22: mol_type = other RNA
caaatgtcatctcccctttggt

SEQ ID NO: 23112 - RNA, 22 nt, synthetic construct
  source 1..22: mol_type = other RNA
caaattaaggcttgagctgggg

SEQ ID NO: 23113 - RNA, 22 nt, synthetic construct
  source 1..22: mol_type = other RNA
caaattcgtaaactttcttaaa

SEQ ID NO: 23114 - RNA, 22 nt, synthetic construct
  source 1..22: mol_type = other RNA
caaattgctgtctctgtcttta

SEQ ID NO: 23115 - RNA, 22 nt, synthetic construct
  source 1..22: mol_type = other RNA
caacaaaccatttttaaagatg

SEQ ID NO: 23116 - RNA, 22 nt, synthetic construct
  source 1..22: mol_type = other RNA
caacaaatggaaaatgggatca

SEQ ID NO: 23117 - RNA, 22 nt, synthetic construct
  source 1..22: mol_type = other RNA
caacaaccccagaattactatg

SEQ ID NO: 23118 - RNA, 22 nt, synthetic construct
  source 1..22: mol_type = other RNA
caacacaaattcgtaaactttc

SEQ ID NO: 23119 - RNA, 22 nt, synthetic construct
  source 1..22: mol_type = other RNA
caacagaccatggaaggcatga

SEQ ID NO: 23120 - RNA, 22 nt, synthetic construct
  source 1..22: mol_type = other RNA
caacagtgaaagcaagcgttaa

SEQ ID NO: 23121 - RNA, 22 nt, synthetic construct
  source 1..22: mol_type = other RNA
caacatctccctttttcttcct

SEQ ID NO: 23122 - RNA, 22 nt, synthetic construct
  source 1..22: mol_type = other RNA
caaccccagaattactatgacc

SEQ ID NO: 23123 - RNA, 22 nt, synthetic construct
  source 1..22: mol_type = other RNA
caacgagactgcggattatcac

SEQ ID NO: 23124 - RNA, 22 nt, synthetic construct
  source 1..22: mol_type = other RNA
caactctcactcatacttgatc

SEQ ID NO: 23125 - RNA, 22 nt, synthetic construct
  source 1..22: mol_type = other RNA
caactgtggacagtatagctgt

SEQ ID NO: 23126 - RNA, 22 nt, synthetic construct
  source 1..22: mol_type = other RNA
caacttgctgtaaacagtacaa

SEQ ID NO: 23127 - RNA, 22 nt, synthetic construct
  source 1..22: mol_type = other RNA
caactttaagtaaatggagtga

SEQ ID NO: 23128 - RNA, 22 nt, synthetic construct
  source 1..22: mol_type = other RNA
caagaactgtcttgggccacat

SEQ ID NO: 23129 - RNA, 22 nt, synthetic construct
  source 1..22: mol_type = other RNA
caagacactattccttcaaaaa

SEQ ID NO: 23130 - RNA, 22 nt, synthetic construct
  source 1..22: mol_type = other RNA
caagacagttcttgcagtgtgg

SEQ ID NO: 23131 - RNA, 22 nt, synthetic construct
  source 1..22: mol_type = other RNA
caagagagggagaaagctagtg

SEQ ID NO: 23132 - RNA, 22 nt, synthetic construct
  source 1..22: mol_type = other RNA
caagataaacatttaagaacgt

SEQ ID NO: 23133 - RNA, 22 nt, synthetic construct
  source 1..22: mol_type = other RNA
caagatatgatgcttagagctc

SEQ ID NO: 23134 - RNA, 22 nt, synthetic construct
  source 1..22: mol_type = other RNA
caagatcaagagagggagaaag

SEQ ID NO: 23135 - RNA, 22 nt, synthetic construct
  source 1..22: mol_type = other RNA
caagatcacctggactgtgaag

SEQ ID NO: 23136 - RNA, 22 nt, synthetic construct
  source 1..22: mol_type = other RNA
caagatgtaagatggatcaaaa

SEQ ID NO: 23137 - RNA, 22 nt, synthetic construct
  source 1..22: mol_type = other RNA
caagcagttaaatgaaatgtaa

SEQ ID NO: 23138 - RNA, 22 nt, synthetic construct
  source 1..22: mol_type = other RNA
caagccagtaatggagtttcac

SEQ ID NO: 23139 - RNA, 22 nt, synthetic construct
  source 1..22: mol_type = other RNA
caagccccagctcaagccttaa

SEQ ID NO: 23140 - RNA, 22 nt, synthetic construct
  source 1..22: mol_type = other RNA
caagccttaatttgtggtggaa

SEQ ID NO: 23141 - RNA, 22 nt, synthetic construct
  source 1..22: mol_type = other RNA
caagcgttaatgagtttggatt

SEQ ID NO: 23142 - RNA, 22 nt, synthetic construct
  source 1..22: mol_type = other RNA
caaggcaggcacatctttaaaa

SEQ ID NO: 23143 - RNA, 22 nt, synthetic construct
  source 1..22: mol_type = other RNA
caagggtagcattccaaaaaga

SEQ ID NO: 23144 - RNA, 22 nt, synthetic construct
  source 1..22: mol_type = other RNA
caagggtctcaaatggtataaa

SEQ ID NO: 23145 - RNA, 22 nt, synthetic construct
  source 1..22: mol_type = other RNA
caagtacaacaaatggaaaatg

SEQ ID NO: 23146 - RNA, 22 nt, synthetic construct
  source 1..22: mol_type = other RNA
caagtatgagtgagagttgcta

SEQ ID NO: 23147 - RNA, 22 nt, synthetic construct
  source 1..22: mol_type = other RNA
caagtccggggctacagctata

SEQ ID NO: 23148 - RNA, 22 nt, synthetic construct
  source 1..22: mol_type = other RNA
caagtgtttccaggaagtgaaa

SEQ ID NO: 23149 - RNA, 22 nt, synthetic construct
  source 1..22: mol_type = other RNA
caagttctgatatatttaacta

SEQ ID NO: 23150 - RNA, 22 nt, synthetic construct
  source 1..22: mol_type = other RNA
caagttgtctaacccgcgggcc

SEQ ID NO: 23151 - RNA, 22 nt, synthetic construct
  source 1..22: mol_type = other RNA
caagttttcacttcctggaaac

SEQ ID NO: 23152 - RNA, 22 nt, synthetic construct
  source 1..22: mol_type = other RNA
caatcaagtgtttccaggaagt

SEQ ID NO: 23153 - RNA, 22 nt, synthetic construct
  source 1..22: mol_type = other RNA
caatcacaaagtaagttttatc

SEQ ID NO: 23154 - RNA, 22 nt, synthetic construct
  source 1..22: mol_type = other RNA
caatcatcctaacaagatgtaa

SEQ ID NO: 23155 - RNA, 22 nt, synthetic construct
  source 1..22: mol_type = other RNA
caatctgtctggtttcgcgaga

SEQ ID NO: 23156 - RNA, 22 nt, synthetic construct
  source 1..22: mol_type = other RNA
caatctttcggcttccctgggc

SEQ ID NO: 23157 - RNA, 22 nt, synthetic construct
  source 1..22: mol_type = other RNA
caatgacaacaaccccagaatt

SEQ ID NO: 23158 - RNA, 22 nt, synthetic construct
  source 1..22: mol_type = other RNA
caatgctcaagattaataaaat

SEQ ID NO: 23159 - RNA, 22 nt, synthetic construct
  source 1..22: mol_type = other RNA
caatgtccacgtattctgtaat

SEQ ID NO: 23160 - RNA, 22 nt, synthetic construct
  source 1..22: mol_type = other RNA
caattcattccatgtgacttca

SEQ ID NO: 23161 - RNA, 22 nt, synthetic construct
  source 1..22: mol_type = other RNA
caattctctgtaaagcagtagt

SEQ ID NO: 23162 - RNA, 22 nt, synthetic construct
  source 1..22: mol_type = other RNA
caatttggaagctatcacacag

SEQ ID NO: 23163 - RNA, 22 nt, synthetic construct
  source 1..22: mol_type = other RNA
cacaaagatatatgacgtctct

SEQ ID NO: 23164 - RNA, 22 nt, synthetic construct
  source 1..22: mol_type = other RNA
cacaaagtaagttttatcctga

SEQ ID NO: 23165 - RNA, 22 nt, synthetic construct
  source 1..22: mol_type = other RNA
cacaaatatgacctctctcctg

SEQ ID NO: 23166 - RNA, 22 nt, synthetic construct
  source 1..22: mol_type = other RNA
cacaaattaaggcttgagctgg

SEQ ID NO: 23167 - RNA, 22 nt, synthetic construct
  source 1..22: mol_type = other RNA
cacacaaatatgacctctctcc

SEQ ID NO: 23168 - RNA, 22 nt, synthetic construct
  source 1..22: mol_type = other RNA
cacacacaaatatgacctctct

SEQ ID NO: 23169 - RNA, 22 nt, synthetic construct
  source 1..22: mol_type = other RNA
cacacagacctattcttcattc

SEQ ID NO: 23170 - RNA, 22 nt, synthetic construct
  source 1..22: mol_type = other RNA
cacacaggcatctgagatcagt

SEQ ID NO: 23171 - RNA, 22 nt, synthetic construct
  source 1..22: mol_type = other RNA
cacactgcaagaactgtcttgg

SEQ ID NO: 23172 - RNA, 22 nt, synthetic construct
  source 1..22: mol_type = other RNA
cacagaacaagtccggggctac

SEQ ID NO: 23173 - RNA, 22 nt, synthetic construct
  source 1..22: mol_type = other RNA
cacagacctattcttcattcaa

SEQ ID NO: 23174 - RNA, 22 nt, synthetic construct
  source 1..22: mol_type = other RNA
cacaggcatctgagatcagtta

SEQ ID NO: 23175 - RNA, 22 nt, synthetic construct
  source 1..22: mol_type = other RNA
cacagtccaggtgatcttgact

SEQ ID NO: 23176 - RNA, 22 nt, synthetic construct
  source 1..22: mol_type = other RNA
cacatactacacacacaaatat

SEQ ID NO: 23177 - RNA, 22 nt, synthetic construct
  source 1..22: mol_type = other RNA
cacatataaaggacagctgatg

SEQ ID NO: 23178 - RNA, 22 nt, synthetic construct
  source 1..22: mol_type = other RNA
cacatctttaaaaatggtttgt

SEQ ID NO: 23179 - RNA, 22 nt, synthetic construct
  source 1..22: mol_type = other RNA
cacatggaatgaattgcagtta

SEQ ID NO: 23180 - RNA, 22 nt, synthetic construct
  source 1..22: mol_type = other RNA
cacattcacgagaacagaattc

SEQ ID NO: 23181 - RNA, 22 nt, synthetic construct
  source 1..22: mol_type = other RNA
caccaaagtgtagcatcaggtt

SEQ ID NO: 23182 - RNA, 22 nt, synthetic construct
  source 1..22: mol_type = other RNA
caccaaatgctttttatattgc

SEQ ID NO: 23183 - RNA, 22 nt, synthetic construct
  source 1..22: mol_type = other RNA
caccacaaattaaggcttgagc

SEQ ID NO: 23184 - RNA, 22 nt, synthetic construct
  source 1..22: mol_type = other RNA
caccaccaaagtgtagcatcag

SEQ ID NO: 23185 - RNA, 22 nt, synthetic construct
  source 1..22: mol_type = other RNA
caccaggctacccaagatcaag

SEQ ID NO: 23186 - RNA, 22 nt, synthetic construct
  source 1..22: mol_type = other RNA
caccccacaaagatatatgacg

SEQ ID NO: 23187 - RNA, 22 nt, synthetic construct
  source 1..22: mol_type = other RNA
cacccctggtttacaggatgaa

SEQ ID NO: 23188 - RNA, 22 nt, synthetic construct
  source 1..22: mol_type = other RNA
caccctctctccccaggctctc

SEQ ID NO: 23189 - RNA, 22 nt, synthetic construct
  source 1..22: mol_type = other RNA
cacctccctaaaattcattatg

SEQ ID NO: 23190 - RNA, 22 nt, synthetic construct
  source 1..22: mol_type = other RNA
cacctgagttttataccatttg

SEQ ID NO: 23191 - RNA, 22 nt, synthetic construct
  source 1..22: mol_type = other RNA
cacctggactgtgaagacggtc

SEQ ID NO: 23192 - RNA, 22 nt, synthetic construct
  source 1..22: mol_type = other RNA
cacctgtcattttcatgctcta

SEQ ID NO: 23193 - RNA, 22 nt, synthetic construct
  source 1..22: mol_type = other RNA
cacgagaacagaattcatcctg

SEQ ID NO: 23194 - RNA, 22 nt, synthetic construct
  source 1..22: mol_type = other RNA
cacgcagtacaaactgctcagg

SEQ ID NO: 23195 - RNA, 22 nt, synthetic construct
  source 1..22: mol_type = other RNA
cacgtattctgtaatccacaga

SEQ ID NO: 23196 - RNA, 22 nt, synthetic construct
  source 1..22: mol_type = other RNA
cacgttcttaaatgtttatctt

SEQ ID NO: 23197 - RNA, 22 nt, synthetic construct
  source 1..22: mol_type = other RNA
cactaaagacagagacagcaat

SEQ ID NO: 23198 - RNA, 22 nt, synthetic construct
  source 1..22: mol_type = other RNA
cactacttatcatttttggagc

SEQ ID NO: 23199 - RNA, 22 nt, synthetic construct
  source 1..22: mol_type = other RNA
cactagctttctccctctcttg

SEQ ID NO: 23200 - RNA, 22 nt, synthetic construct
  source 1..22: mol_type = other RNA
cactattccttcaaaaagctca

SEQ ID NO: 23201 - RNA, 22 nt, synthetic construct
  source 1..22: mol_type = other RNA
cactattttccacatactacac

SEQ ID NO: 23202 - RNA, 22 nt, synthetic construct
  source 1..22: mol_type = other RNA
cactcatacttgatcccatttt

SEQ ID NO: 23203 - RNA, 22 nt, synthetic construct
  source 1..22: mol_type = other RNA
cactccatttacttaaagttgg

SEQ ID NO: 23204 - RNA, 22 nt, synthetic construct
  source 1..22: mol_type = other RNA
cactgcaagaactgtcttgggc

SEQ ID NO: 23205 - RNA, 22 nt, synthetic construct
  source 1..22: mol_type = other RNA
cactgctgggtaagagtcaagc

SEQ ID NO: 23206 - RNA, 22 nt, synthetic construct
  source 1..22: mol_type = other RNA
cactggtttctcaagcaaaagc

SEQ ID NO: 23207 - RNA, 22 nt, synthetic construct
  source 1..22: mol_type = other RNA
cactgttgtccaaggcaggcac

SEQ ID NO: 23208 - RNA, 22 nt, synthetic construct
  source 1..22: mol_type = other RNA
cacttcctggaaacacttgatt

SEQ ID NO: 23209 - RNA, 22 nt, synthetic construct
  source 1..22: mol_type = other RNA
cacttgattggaggagctctaa

SEQ ID NO: 23210 - RNA, 22 nt, synthetic construct
  source 1..22: mol_type = other RNA
cactttggtggtgcagcaaggg

SEQ ID NO: 23211 - RNA, 22 nt, synthetic construct
  source 1..22: mol_type = other RNA
cacttttccaatgctcaagatt

SEQ ID NO: 23212 - RNA, 22 nt, synthetic construct
  source 1..22: mol_type = other RNA
cagaaatgagaggtatttagag

SEQ ID NO: 23213 - RNA, 22 nt, synthetic construct
  source 1..22: mol_type = other RNA
cagaaatttaggctgggttcat

SEQ ID NO: 23214 - RNA, 22 nt, synthetic construct
  source 1..22: mol_type = other RNA
cagaacaagtccggggctacag

SEQ ID NO: 23215 - RNA, 22 nt, synthetic construct
  source 1..22: mol_type = other RNA
cagaacttgaatgaagaatagg

SEQ ID NO: 23216 - RNA, 22 nt, synthetic construct
  source 1..22: mol_type = other RNA
cagaagaaaactgcttttttaa

SEQ ID NO: 23217 - RNA, 22 nt, synthetic construct
  source 1..22: mol_type = other RNA
cagaatacgtggacattgatgg

SEQ ID NO: 23218 - RNA, 22 nt, synthetic construct
  source 1..22: mol_type = other RNA
cagaatagttaaggtaatttaa

SEQ ID NO: 23219 - RNA, 22 nt, synthetic construct
  source 1..22: mol_type = other RNA
cagaatcccagctaaggaaaaa

SEQ ID NO: 23220 - RNA, 22 nt, synthetic construct
  source 1..22: mol_type = other RNA
cagaattactatgacccacgca

SEQ ID NO: 23221 - RNA, 22 nt, synthetic construct
  source 1..22: mol_type = other RNA
cagaattcatcctgtaaaccag

SEQ ID NO: 23222 - RNA, 22 nt, synthetic construct
  source 1..22: mol_type = other RNA
cagacagattggttccaccaca

SEQ ID NO: 23223 - RNA, 22 nt, synthetic construct
  source 1..22: mol_type = other RNA
cagacataaagcatgatcacct

SEQ ID NO: 23224 - RNA, 22 nt, synthetic construct
  source 1..22: mol_type = other RNA
cagacatagcactagctttctc

SEQ ID NO: 23225 - RNA, 22 nt, synthetic construct
  source 1..22: mol_type = other RNA
cagaccatggaaggcatgacca

SEQ ID NO: 23226 - RNA, 22 nt, synthetic construct
  source 1..22: mol_type = other RNA
cagacctattcttcattcaagt

SEQ ID NO: 23227 - RNA, 22 nt, synthetic construct
  source 1..22: mol_type = other RNA
cagagaattggatctgaggtta

SEQ ID NO: 23228 - RNA, 22 nt, synthetic construct
  source 1..22: mol_type = other RNA
cagagacagcaatttggaagct

SEQ ID NO: 23229 - RNA, 22 nt, synthetic construct
  source 1..22: mol_type = other RNA
cagagagcttcagcttttattt

SEQ ID NO: 23230 - RNA, 22 nt, synthetic construct
  source 1..22: mol_type = other RNA
cagagtatactaggagctcagg

SEQ ID NO: 23231 - RNA, 22 nt, synthetic construct
  source 1..22: mol_type = other RNA
cagatccaattctctgtaaagc

SEQ ID NO: 23232 - RNA, 22 nt, synthetic construct
  source 1..22: mol_type = other RNA
cagatgcctgtgtgatagcttc

SEQ ID NO: 23233 - RNA, 22 nt, synthetic construct
  source 1..22: mol_type = other RNA
cagattcaaatgtcatctcccc

SEQ ID NO: 23234 - RNA, 22 nt, synthetic construct
  source 1..22: mol_type = other RNA
cagattggttccaccacaaatt

SEQ ID NO: 23235 - RNA, 22 nt, synthetic construct
  source 1..22: mol_type = other RNA
cagcaagggtagcattccaaaa

SEQ ID NO: 23236 - RNA, 22 nt, synthetic construct
  source 1..22: mol_type = other RNA
cagcaagggtctcaaatggtat

SEQ ID NO: 23237 - RNA, 22 nt, synthetic construct
  source 1..22: mol_type = other RNA
cagcaagttgtctaacccgcgg

SEQ ID NO: 23238 - RNA, 22 nt, synthetic construct
  source 1..22: mol_type = other RNA
cagcaatgacaacaaccccaga

SEQ ID NO: 23239 - RNA, 22 nt, synthetic construct
  source 1..22: mol_type = other RNA
cagcaatttggaagctatcaca

SEQ ID NO: 23240 - RNA, 22 nt, synthetic construct
  source 1..22: mol_type = other RNA
cagcagtgcttttattcctccc

SEQ ID NO: 23241 - RNA, 22 nt, synthetic construct
  source 1..22: mol_type = other RNA
cagccacttttccaatgctcaa

SEQ ID NO: 23242 - RNA, 22 nt, synthetic construct
  source 1..22: mol_type = other RNA
cagcctaaatttctgtcctaca

SEQ ID NO: 23243 - RNA, 22 nt, synthetic construct
  source 1..22: mol_type = other RNA
cagctaaggaaaaaggataaaa

SEQ ID NO: 23244 - RNA, 22 nt, synthetic construct
  source 1..22: mol_type = other RNA
cagctatactgtccacagttgc

SEQ ID NO: 23245 - RNA, 22 nt, synthetic construct
  source 1..22: mol_type = other RNA
cagctcaagccttaatttgtgg

SEQ ID NO: 23246 - RNA, 22 nt, synthetic construct
  source 1..22: mol_type = other RNA
cagctgtcctttatatgtggcc

SEQ ID NO: 23247 - RNA, 22 nt, synthetic construct
  source 1..22: mol_type = other RNA
cagcttttatttccttactgct

SEQ ID NO: 23248 - RNA, 22 nt, synthetic construct
  source 1..22: mol_type = other RNA
cagctttttcatttttcactat

SEQ ID NO: 23249 - RNA, 22 nt, synthetic construct
  source 1..22: mol_type = other RNA
caggaagtgaaaacttgtagga

SEQ ID NO: 23250 - RNA, 22 nt, synthetic construct
  source 1..22: mol_type = other RNA
caggagagaggtcatatttgtg

SEQ ID NO: 23251 - RNA, 22 nt, synthetic construct
  source 1..22: mol_type = other RNA
caggagctacatagttaaatat

SEQ ID NO: 23252 - RNA, 22 nt, synthetic construct
  source 1..22: mol_type = other RNA
caggagtacaagacactattcc

SEQ ID NO: 23253 - RNA, 22 nt, synthetic construct
  source 1..22: mol_type = other RNA
caggagtcagaagaaaactgct

SEQ ID NO: 23254 - RNA, 22 nt, synthetic construct
  source 1..22: mol_type = other RNA
caggataaaacttactttgtga

SEQ ID NO: 23255 - RNA, 22 nt, synthetic construct
  source 1..22: mol_type = other RNA
caggatgaattctgttctcgtg

SEQ ID NO: 23256 - RNA, 22 nt, synthetic construct
  source 1..22: mol_type = other RNA
caggattaaaagcagcaagggt

SEQ ID NO: 23257 - RNA, 22 nt, synthetic construct
  source 1..22: mol_type = other RNA
caggcacatctttaaaaatggt

SEQ ID NO: 23258 - RNA, 22 nt, synthetic construct
  source 1..22: mol_type = other RNA
caggcatctgagatcagttact

SEQ ID NO: 23259 - RNA, 22 nt, synthetic construct
  source 1..22: mol_type = other RNA
caggcatcttagcaactctcac

SEQ ID NO: 23260 - RNA, 22 nt, synthetic construct
  source 1..22: mol_type = other RNA
caggctacccaagatcaagaga

SEQ ID NO: 23261 - RNA, 22 nt, synthetic construct
  source 1..22: mol_type = other RNA
caggctctctacccctttgcat

SEQ ID NO: 23262 - RNA, 22 nt, synthetic construct
  source 1..22: mol_type = other RNA
cagggacagaatcccagctaag

SEQ ID NO: 23263 - RNA, 22 nt, synthetic construct
  source 1..22: mol_type = other RNA
cagggaccttatgcatcacatt

SEQ ID NO: 23264 - RNA, 22 nt, synthetic construct
  source 1..22: mol_type = other RNA
caggtgaaactccattactggc

SEQ ID NO: 23265 - RNA, 22 nt, synthetic construct
  source 1..22: mol_type = other RNA
caggtgatcatgctttatgtct

SEQ ID NO: 23266 - RNA, 22 nt, synthetic construct
  source 1..22: mol_type = other RNA
caggtgatcttgactactgctt

SEQ ID NO: 23267 - RNA, 22 nt, synthetic construct
  source 1..22: mol_type = other RNA
cagtaaaaagagaaaaccatca

SEQ ID NO: 23268 - RNA, 22 nt, synthetic construct
  source 1..22: mol_type = other RNA
cagtaaggaaataaaagctgaa

SEQ ID NO: 23269 - RNA, 22 nt, synthetic construct
  source 1..22: mol_type = other RNA
cagtaatggagtttcacctgtc

SEQ ID NO: 23270 - RNA, 22 nt, synthetic construct
  source 1..22: mol_type = other RNA
cagtacaaactgctcaggagtc

SEQ ID NO: 23271 - RNA, 22 nt, synthetic construct
  source 1..22: mol_type = other RNA
cagtacaagccagtaatggagt

SEQ ID NO: 23272 - RNA, 22 nt, synthetic construct
  source 1..22: mol_type = other RNA
cagtagtcaagatcacctggac

SEQ ID NO: 23273 - RNA, 22 nt, synthetic construct
  source 1..22: mol_type = other RNA
cagtatagctgtagccccggac

SEQ ID NO: 23274 - RNA, 22 nt, synthetic construct
  source 1..22: mol_type = other RNA
cagtccaggtgatcttgactac

SEQ ID NO: 23275 - RNA, 22 nt, synthetic construct
  source 1..22: mol_type = other RNA
cagtgaaagcaagcgttaatga

SEQ ID NO: 23276 - RNA, 22 nt, synthetic construct
  source 1..22: mol_type = other RNA
cagtgcttccctccctcaccct

SEQ ID NO: 23277 - RNA, 22 nt, synthetic construct
  source 1..22: mol_type = other RNA
cagtgcttttattcctccctag

SEQ ID NO: 23278 - RNA, 22 nt, synthetic construct
  source 1..22: mol_type = other RNA
cagttaaatgaaatgtaatggg

SEQ ID NO: 23279 - RNA, 22 nt, synthetic construct
  source 1..22: mol_type = other RNA
cagttacccaaatcatagagac

SEQ ID NO: 23280 - RNA, 22 nt, synthetic construct
  source 1..22: mol_type = other RNA
cagttactaactggtaagaaca

SEQ ID NO: 23281 - RNA, 22 nt, synthetic construct
  source 1..22: mol_type = other RNA
cagttagtaactgatctcagat

SEQ ID NO: 23282 - RNA, 22 nt, synthetic construct
  source 1..22: mol_type = other RNA
cagttcttgcagtgtggcccag

SEQ ID NO: 23283 - RNA, 22 nt, synthetic construct
  source 1..22: mol_type = other RNA
cagttctttagtcataccagcc

SEQ ID NO: 23284 - RNA, 22 nt, synthetic construct
  source 1..22: mol_type = other RNA
cagtttaatggaatctcacctc

SEQ ID NO: 23285 - RNA, 22 nt, synthetic construct
  source 1..22: mol_type = other RNA
cagtttgggtcatagaacaaca

SEQ ID NO: 23286 - RNA, 22 nt, synthetic construct
  source 1..22: mol_type = other RNA
cagtttgtactgcgtgggtcat

SEQ ID NO: 23287 - RNA, 22 nt, synthetic construct
  source 1..22: mol_type = other RNA
cagttttcttctgactcctgag

SEQ ID NO: 23288 - RNA, 22 nt, synthetic construct
  source 1..22: mol_type = other RNA
cataaagacatttacatgtcgc

SEQ ID NO: 23289 - RNA, 22 nt, synthetic construct
  source 1..22: mol_type = other RNA
cataaagcatgatcacctgagt

SEQ ID NO: 23290 - RNA, 22 nt, synthetic construct
  source 1..22: mol_type = other RNA
cataaggtccctggatagactt

SEQ ID NO: 23291 - RNA, 22 nt, synthetic construct
  source 1..22: mol_type = other RNA
cataatgaattttagggaggtg

SEQ ID NO: 23292 - RNA, 22 nt, synthetic construct
  source 1..22: mol_type = other RNA
cataccagccacttttccaatg

SEQ ID NO: 23293 - RNA, 22 nt, synthetic construct
  source 1..22: mol_type = other RNA
catactacacacacaaatatga

SEQ ID NO: 23294 - RNA, 22 nt, synthetic construct
  source 1..22: mol_type = other RNA
catacttgatcccattttccat

SEQ ID NO: 23295 - RNA, 22 nt, synthetic construct
  source 1..22: mol_type = other RNA
catagaacaacagaccatggaa

SEQ ID NO: 23296 - RNA, 22 nt, synthetic construct
  source 1..22: mol_type = other RNA
catagagacgtcatatatcttt

SEQ ID NO: 23297 - RNA, 22 nt, synthetic construct
  source 1..22: mol_type = other RNA
catagcactagctttctccctc

SEQ ID NO: 23298 - RNA, 22 nt, synthetic construct
  source 1..22: mol_type = other RNA
catagtaattctggggttgttg

SEQ ID NO: 23299 - RNA, 22 nt, synthetic construct
  source 1..22: mol_type = other RNA
catatatctttgtggggtggtt

SEQ ID NO: 23300 - RNA, 22 nt, synthetic construct
  source 1..22: mol_type = other RNA
catatcttgagttatagaaaac

SEQ ID NO: 23301 - RNA, 22 nt, synthetic construct
  source 1..22: mol_type = other RNA
catatttgtgtgtgtagtatgt

SEQ ID NO: 23302 - RNA, 22 nt, synthetic construct
  source 1..22: mol_type = other RNA
catcaatgtccacgtattctgt

SEQ ID NO: 23303 - RNA, 22 nt, synthetic construct
  source 1..22: mol_type = other RNA
catcacattcacgagaacagaa

SEQ ID NO: 23304 - RNA, 22 nt, synthetic construct
  source 1..22: mol_type = other RNA
catcagagtatactaggagctc

SEQ ID NO: 23305 - RNA, 22 nt, synthetic construct
  source 1..22: mol_type = other RNA
catcagctgtcctttatatgtg

SEQ ID NO: 23306 - RNA, 22 nt, synthetic construct
  source 1..22: mol_type = other RNA
catcatatcttgagttatagaa

SEQ ID NO: 23307 - RNA, 22 nt, synthetic construct
  source 1..22: mol_type = other RNA
catccctaccaggcatcttagc

SEQ ID NO: 23308 - RNA, 22 nt, synthetic construct
  source 1..22: mol_type = other RNA
catcctaacaagatgtaagatg

SEQ ID NO: 23309 - RNA, 22 nt, synthetic construct
  source 1..22: mol_type = other RNA
catcctgtaaaccaggggtgtc

SEQ ID NO: 23310 - RNA, 22 nt, synthetic construct
  source 1..22: mol_type = other RNA
catctcccctttggtcatgcct

SEQ ID NO: 23311 - RNA, 22 nt, synthetic construct
  source 1..22: mol_type = other RNA
catctccctttttcttcctcta

SEQ ID NO: 23312 - RNA, 22 nt, synthetic construct
  source 1..22: mol_type = other RNA
catctgagatcagttactaact

SEQ ID NO: 23313 - RNA, 22 nt, synthetic construct
  source 1..22: mol_type = other RNA
catcttacatcttgttaggatg

SEQ ID NO: 23314 - RNA, 22 nt, synthetic construct
  source 1..22: mol_type = other RNA
catcttagcaactctcactcat

SEQ ID NO: 23315 - RNA, 22 nt, synthetic construct
  source 1..22: mol_type = other RNA
catcttgttaggatgattgtcc

SEQ ID NO: 23316 - RNA, 22 nt, synthetic construct
  source 1..22: mol_type = other RNA
catctttaaaaatggtttgttg

SEQ ID NO: 23317 - RNA, 22 nt, synthetic construct
  source 1..22: mol_type = other RNA
catgaaaatgacaggtgaaact

SEQ ID NO: 23318 - RNA, 22 nt, synthetic construct
  source 1..22: mol_type = other RNA
catgaccaaaggggagatgaca

SEQ ID NO: 23319 - RNA, 22 nt, synthetic construct
  source 1..22: mol_type = other RNA
catgatcacctgagttttatac

SEQ ID NO: 23320 - RNA, 22 nt, synthetic construct
  source 1..22: mol_type = other RNA
catgccttccatggtctgttgt

SEQ ID NO: 23321 - RNA, 22 nt, synthetic construct
  source 1..22: mol_type = other RNA
catgcggcccgcgggttagaca

SEQ ID NO: 23322 - RNA, 22 nt, synthetic construct
  source 1..22: mol_type = other RNA
catgctctatcttcctttagga

SEQ ID NO: 23323 - RNA, 22 nt, synthetic construct
  source 1..22: mol_type = other RNA
catgctttatgtctgtctctag

SEQ ID NO: 23324 - RNA, 22 nt, synthetic construct
  source 1..22: mol_type = other RNA
catggaaggcatgaccaaaggg

SEQ ID NO: 23325 - RNA, 22 nt, synthetic construct
  source 1..22: mol_type = other RNA
catggaatgaattgcagttacc

SEQ ID NO: 23326 - RNA, 22 nt, synthetic construct
  source 1..22: mol_type = other RNA
catgggacccaggacagctttg

SEQ ID NO: 23327 - RNA, 22 nt, synthetic construct
  source 1..22: mol_type = other RNA
catggtctgttgttctatgacc

SEQ ID NO: 23328 - RNA, 22 nt, synthetic construct
  source 1..22: mol_type = other RNA
catgtaaatgtctttatggttt

SEQ ID NO: 23329 - RNA, 22 nt, synthetic construct
  source 1..22: mol_type = other RNA
catgtcgctcactccatttact

SEQ ID NO: 23330 - RNA, 22 nt, synthetic construct
  source 1..22: mol_type = other RNA
catgtgacttcaggagagaggt

SEQ ID NO: 23331 - RNA, 22 nt, synthetic construct
  source 1..22: mol_type = other RNA
cattaaactgttacaggagcta

SEQ ID NO: 23332 - RNA, 22 nt, synthetic construct
  source 1..22: mol_type = other RNA
cattaacgcttgctttcactgt

SEQ ID NO: 23333 - RNA, 22 nt, synthetic construct
  source 1..22: mol_type = other RNA
cattacatttcatttaactgct

SEQ ID NO: 23334 - RNA, 22 nt, synthetic construct
  source 1..22: mol_type = other RNA
cattactggcttgtactgttta

SEQ ID NO: 23335 - RNA, 22 nt, synthetic construct
  source 1..22: mol_type = other RNA
cattcaaagctgtcctgggtcc

SEQ ID NO: 23336 - RNA, 22 nt, synthetic construct
  source 1..22: mol_type = other RNA
cattcacgagaacagaattcat

SEQ ID NO: 23337 - RNA, 22 nt, synthetic construct
  source 1..22: mol_type = other RNA
cattccaaaaagaaccacccca

SEQ ID NO: 23338 - RNA, 22 nt, synthetic construct
  source 1..22: mol_type = other RNA
cattccatgtgacttcaggaga

SEQ ID NO: 23339 - RNA, 22 nt, synthetic construct
  source 1..22: mol_type = other RNA
cattgatggttttctcttttta

SEQ ID NO: 23340 - RNA, 22 nt, synthetic construct
  source 1..22: mol_type = other RNA
cattgctgatttaaattacctt

SEQ ID NO: 23341 - RNA, 22 nt, synthetic construct
  source 1..22: mol_type = other RNA
cattggaaaagtggctggtatg

SEQ ID NO: 23342 - RNA, 22 nt, synthetic construct
  source 1..22: mol_type = other RNA
catttaagaacgtgaactaggg

SEQ ID NO: 23343 - RNA, 22 nt, synthetic construct
  source 1..22: mol_type = other RNA
catttacatgtcgctcactcca

SEQ ID NO: 23344 - RNA, 22 nt, synthetic construct
  source 1..22: mol_type = other RNA
catttacttaaagttggctaga

SEQ ID NO: 23345 - RNA, 22 nt, synthetic construct
  source 1..22: mol_type = other RNA
catttctgttcttaccagttag

SEQ ID NO: 23346 - RNA, 22 nt, synthetic construct
  source 1..22: mol_type = other RNA
catttgaatctgcaggattaaa

SEQ ID NO: 23347 - RNA, 22 nt, synthetic construct
  source 1..22: mol_type = other RNA
catttgagacccttgctgcacc

SEQ ID NO: 23348 - RNA, 22 nt, synthetic construct
  source 1..22: mol_type = other RNA
catttgtatcacacagacctat

SEQ ID NO: 23349 - RNA, 22 nt, synthetic construct
  source 1..22: mol_type = other RNA
catttgttgtacttgctcctct

SEQ ID NO: 23350 - RNA, 22 nt, synthetic construct
  source 1..22: mol_type = other RNA
cattttaacaccaaatgctttt

SEQ ID NO: 23351 - RNA, 22 nt, synthetic construct
  source 1..22: mol_type = other RNA
cattttatcctttttccttagc

SEQ ID NO: 23352 - RNA, 22 nt, synthetic construct
  source 1..22: mol_type = other RNA
cattttattaatcttgagcatt

SEQ ID NO: 23353 - RNA, 22 nt, synthetic construct
  source 1..22: mol_type = other RNA
cattttcatgctctatcttcct

SEQ ID NO: 23354 - RNA, 22 nt, synthetic construct
  source 1..22: mol_type = other RNA
cattttccatttgttgtacttg

SEQ ID NO: 23355 - RNA, 22 nt, synthetic construct
  source 1..22: mol_type = other RNA
catttttaaagatgtgcctgcc

SEQ ID NO: 23356 - RNA, 22 nt, synthetic construct
  source 1..22: mol_type = other RNA
catttttcactattttccacat

SEQ ID NO: 23357 - RNA, 22 nt, synthetic construct
  source 1..22: mol_type = other RNA
catttttctagagacagacata

SEQ ID NO: 23358 - RNA, 22 nt, synthetic construct
  source 1..22: mol_type = other RNA
catttttggagcatttttctag

SEQ ID NO: 23359 - RNA, 22 nt, synthetic construct
  source 1..22: mol_type = other RNA
ccaaaaagaaccaccccacaaa

SEQ ID NO: 23360 - RNA, 22 nt, synthetic construct
  source 1..22: mol_type = other RNA
ccaaaaatgataagtagtgata

SEQ ID NO: 23361 - RNA, 22 nt, synthetic construct
  source 1..22: mol_type = other RNA
ccaaactcattaacgcttgctt

SEQ ID NO: 23362 - RNA, 22 nt, synthetic construct
  source 1..22: mol_type = other RNA
ccaaactgcccttttaaaaaag

SEQ ID NO: 23363 - RNA, 22 nt, synthetic construct
  source 1..22: mol_type = other RNA
ccaaaggggagatgacatttga

SEQ ID NO: 23364 - RNA, 22 nt, synthetic construct
  source 1..22: mol_type = other RNA
ccaaagtgtagcatcaggttaa

SEQ ID NO: 23365 - RNA, 22 nt, synthetic construct
  source 1..22: mol_type = other RNA
ccaaatcatagagacgtcatat

SEQ ID NO: 23366 - RNA, 22 nt, synthetic construct
  source 1..22: mol_type = other RNA
ccaaatgctttttatattgcta

SEQ ID NO: 23367 - RNA, 22 nt, synthetic construct
  source 1..22: mol_type = other RNA
ccaaattgctgtctctgtcttt

SEQ ID NO: 23368 - RNA, 22 nt, synthetic construct
  source 1..22: mol_type = other RNA
ccaacaaaccatttttaaagat

SEQ ID NO: 23369 - RNA, 22 nt, synthetic construct
  source 1..22: mol_type = other RNA
ccaacattttaacaccaaatgc

SEQ ID NO: 23370 - RNA, 22 nt, synthetic construct
  source 1..22: mol_type = other RNA
ccaactttaagtaaatggagtg

SEQ ID NO: 23371 - RNA, 22 nt, synthetic construct
  source 1..22: mol_type = other RNA
ccaagacagttcttgcagtgtg

SEQ ID NO: 23372 - RNA, 22 nt, synthetic construct
  source 1..22: mol_type = other RNA
ccaagatcaagagagggagaaa

SEQ ID NO: 23373 - RNA, 22 nt, synthetic construct
  source 1..22: mol_type = other RNA
ccaaggcaggcacatctttaaa

SEQ ID NO: 23374 - RNA, 22 nt, synthetic construct
  source 1..22: mol_type = other RNA
ccaatcaagtgtttccaggaag

SEQ ID NO: 23375 - RNA, 22 nt, synthetic construct
  source 1..22: mol_type = other RNA
ccaatctgtctggtttcgcgag

SEQ ID NO: 23376 - RNA, 22 nt, synthetic construct
  source 1..22: mol_type = other RNA
ccaatgctcaagattaataaaa

SEQ ID NO: 23377 - RNA, 22 nt, synthetic construct
  source 1..22: mol_type = other RNA
ccaattctctgtaaagcagtag

SEQ ID NO: 23378 - RNA, 22 nt, synthetic construct
  source 1..22: mol_type = other RNA
ccacaaagatatatgacgtctc

SEQ ID NO: 23379 - RNA, 22 nt, synthetic construct
  source 1..22: mol_type = other RNA
ccacaaattaaggcttgagctg

SEQ ID NO: 23380 - RNA, 22 nt, synthetic construct
  source 1..22: mol_type = other RNA
ccacactgcaagaactgtcttg

SEQ ID NO: 23381 - RNA, 22 nt, synthetic construct
  source 1..22: mol_type = other RNA
ccacagaacaagtccggggcta

SEQ ID NO: 23382 - RNA, 22 nt, synthetic construct
  source 1..22: mol_type = other RNA
ccacagttgcaattcaaattag

SEQ ID NO: 23383 - RNA, 22 nt, synthetic construct
  source 1..22: mol_type = other RNA
ccacatactacacacacaaata

SEQ ID NO: 23384 - RNA, 22 nt, synthetic construct
  source 1..22: mol_type = other RNA
ccacatataaaggacagctgat

SEQ ID NO: 23385 - RNA, 22 nt, synthetic construct
  source 1..22: mol_type = other RNA
ccaccaaagtgtagcatcaggt

SEQ ID NO: 23386 - RNA, 22 nt, synthetic construct
  source 1..22: mol_type = other RNA
ccaccacaaattaaggcttgag

SEQ ID NO: 23387 - RNA, 22 nt, synthetic construct
  source 1..22: mol_type = other RNA
ccaccccacaaagatatatgac

SEQ ID NO: 23388 - RNA, 22 nt, synthetic construct
  source 1..22: mol_type = other RNA
ccacgcagtacaaactgctcag

SEQ ID NO: 23389 - RNA, 22 nt, synthetic construct
  source 1..22: mol_type = other RNA
ccacgtattctgtaatccacag

SEQ ID NO: 23390 - RNA, 22 nt, synthetic construct
  source 1..22: mol_type = other RNA
ccacttttccaatgctcaagat

SEQ ID NO: 23391 - RNA, 22 nt, synthetic construct
  source 1..22: mol_type = other RNA
ccagaattactatgacccacgc

SEQ ID NO: 23392 - RNA, 22 nt, synthetic construct
  source 1..22: mol_type = other RNA
ccagacagattggttccaccac

SEQ ID NO: 23393 - RNA, 22 nt, synthetic construct
  source 1..22: mol_type = other RNA
ccagagagcttcagcttttatt

SEQ ID NO: 23394 - RNA, 22 nt, synthetic construct
  source 1..22: mol_type = other RNA
ccagcagtgcttttattcctcc

SEQ ID NO: 23395 - RNA, 22 nt, synthetic construct
  source 1..22: mol_type = other RNA
ccagccacttttccaatgctca

SEQ ID NO: 23396 - RNA, 22 nt, synthetic construct
  source 1..22: mol_type = other RNA
ccagcctaaatttctgtcctac

SEQ ID NO: 23397 - RNA, 22 nt, synthetic construct
  source 1..22: mol_type = other RNA
ccagctaaggaaaaaggataaa

SEQ ID NO: 23398 - RNA, 22 nt, synthetic construct
  source 1..22: mol_type = other RNA
ccagctcaagccttaatttgtg

SEQ ID NO: 23399 - RNA, 22 nt, synthetic construct
  source 1..22: mol_type = other RNA
ccaggaagtgaaaacttgtagg

SEQ ID NO: 23400 - RNA, 22 nt, synthetic construct
  source 1..22: mol_type = other RNA
ccaggcatcttagcaactctca

SEQ ID NO: 23401 - RNA, 22 nt, synthetic construct
  source 1..22: mol_type = other RNA
ccaggctacccaagatcaagag

SEQ ID NO: 23402 - RNA, 22 nt, synthetic construct
  source 1..22: mol_type = other RNA
ccaggctctctacccctttgca

SEQ ID NO: 23403 - RNA, 22 nt, synthetic construct
  source 1..22: mol_type = other RNA
ccagggaccttatgcatcacat

SEQ ID NO: 23404 - RNA, 22 nt, synthetic construct
  source 1..22: mol_type = other RNA
ccaggtgatcttgactactgct

SEQ ID NO: 23405 - RNA, 22 nt, synthetic construct
  source 1..22: mol_type = other RNA
ccagtaatggagtttcacctgt

SEQ ID NO: 23406 - RNA, 22 nt, synthetic construct
  source 1..22: mol_type = other RNA
ccagtgcttccctccctcaccc

SEQ ID NO: 23407 - RNA, 22 nt, synthetic construct
  source 1..22: mol_type = other RNA
ccagttagtaactgatctcaga

SEQ ID NO: 23408 - RNA, 22 nt, synthetic construct
  source 1..22: mol_type = other RNA
ccataaagacatttacatgtcg

SEQ ID NO: 23409 - RNA, 22 nt, synthetic construct
  source 1..22: mol_type = other RNA
ccatcaatgtccacgtattctg

SEQ ID NO: 23410 - RNA, 22 nt, synthetic construct
  source 1..22: mol_type = other RNA
ccatcttacatcttgttaggat

SEQ ID NO: 23411 - RNA, 22 nt, synthetic construct
  source 1..22: mol_type = other RNA
ccatgcggcccgcgggttagac

SEQ ID NO: 23412 - RNA, 22 nt, synthetic construct
  source 1..22: mol_type = other RNA
ccatggaaggcatgaccaaagg

SEQ ID NO: 23413 - RNA, 22 nt, synthetic construct
  source 1..22: mol_type = other RNA
ccatggtctgttgttctatgac

SEQ ID NO: 23414 - RNA, 22 nt, synthetic construct
  source 1..22: mol_type = other RNA
ccatgtgacttcaggagagagg

SEQ ID NO: 23415 - RNA, 22 nt, synthetic construct
  source 1..22: mol_type = other RNA
ccattaaactgttacaggagct

SEQ ID NO: 23416 - RNA, 22 nt, synthetic construct
  source 1..22: mol_type = other RNA
ccattacatttcatttaactgc

SEQ ID NO: 23417 - RNA, 22 nt, synthetic construct
  source 1..22: mol_type = other RNA
ccattactggcttgtactgttt

SEQ ID NO: 23418 - RNA, 22 nt, synthetic construct
  source 1..22: mol_type = other RNA
ccatttacttaaagttggctag

SEQ ID NO: 23419 - RNA, 22 nt, synthetic construct
  source 1..22: mol_type = other RNA
ccatttgagacccttgctgcac

SEQ ID NO: 23420 - RNA, 22 nt, synthetic construct
  source 1..22: mol_type = other RNA
ccatttgttgtacttgctcctc

SEQ ID NO: 23421 - RNA, 22 nt, synthetic construct
  source 1..22: mol_type = other RNA
ccattttccatttgttgtactt

SEQ ID NO: 23422 - RNA, 22 nt, synthetic construct
  source 1..22: mol_type = other RNA
ccatttttaaagatgtgcctgc

SEQ ID NO: 23423 - RNA, 22 nt, synthetic construct
  source 1..22: mol_type = other RNA
cccaaactgcccttttaaaaaa

SEQ ID NO: 23424 - RNA, 22 nt, synthetic construct
  source 1..22: mol_type = other RNA
cccaaatcatagagacgtcata

SEQ ID NO: 23425 - RNA, 22 nt, synthetic construct
  source 1..22: mol_type = other RNA
cccaagacagttcttgcagtgt

SEQ ID NO: 23426 - RNA, 22 nt, synthetic construct
  source 1..22: mol_type = other RNA
cccaagatcaagagagggagaa

SEQ ID NO: 23427 - RNA, 22 nt, synthetic construct
  source 1..22: mol_type = other RNA
cccacaaagatatatgacgtct

SEQ ID NO: 23428 - RNA, 22 nt, synthetic construct
  source 1..22: mol_type = other RNA
cccacgcagtacaaactgctca

SEQ ID NO: 23429 - RNA, 22 nt, synthetic construct
  source 1..22: mol_type = other RNA
cccagaattactatgacccacg

SEQ ID NO: 23430 - RNA, 22 nt, synthetic construct
  source 1..22: mol_type = other RNA
cccagcagtgcttttattcctc

SEQ ID NO: 23431 - RNA, 22 nt, synthetic construct
  source 1..22: mol_type = other RNA
cccagcctaaatttctgtccta

SEQ ID NO: 23432 - RNA, 22 nt, synthetic construct
  source 1..22: mol_type = other RNA
cccagctaaggaaaaaggataa

SEQ ID NO: 23433 - RNA, 22 nt, synthetic construct
  source 1..22: mol_type = other RNA
cccagctcaagccttaatttgt

SEQ ID NO: 23434 - RNA, 22 nt, synthetic construct
  source 1..22: mol_type = other RNA
cccaggctctctacccctttgc

SEQ ID NO: 23435 - RNA, 22 nt, synthetic construct
  source 1..22: mol_type = other RNA
cccatgcggcccgcgggttaga

SEQ ID NO: 23436 - RNA, 22 nt, synthetic construct
  source 1..22: mol_type = other RNA
cccattacatttcatttaactg

SEQ ID NO: 23437 - RNA, 22 nt, synthetic construct
  source 1..22: mol_type = other RNA
cccattttccatttgttgtact

SEQ ID NO: 23438 - RNA, 22 nt, synthetic construct
  source 1..22: mol_type = other RNA
ccccacaaagatatatgacgtc

SEQ ID NO: 23439 - RNA, 22 nt, synthetic construct
  source 1..22: mol_type = other RNA
ccccagaattactatgacccac

SEQ ID NO: 23440 - RNA, 22 nt, synthetic construct
  source 1..22: mol_type = other RNA
ccccagctcaagccttaatttg

SEQ ID NO: 23441 - RNA, 22 nt, synthetic construct
  source 1..22: mol_type = other RNA
ccccaggctctctacccctttg

SEQ ID NO: 23442 - RNA, 22 nt, synthetic construct
  source 1..22: mol_type = other RNA
ccccggacttgttctgtggatt

SEQ ID NO: 23443 - RNA, 22 nt, synthetic construct
  source 1..22: mol_type = other RNA
cccctggtttacaggatgaatt

SEQ ID NO: 23444 - RNA, 22 nt, synthetic construct
  source 1..22: mol_type = other RNA
cccctttgcatccctaccaggc

SEQ ID NO: 23445 - RNA, 22 nt, synthetic construct
  source 1..22: mol_type = other RNA
cccctttggtcatgccttccat

SEQ ID NO: 23446 - RNA, 22 nt, synthetic construct
  source 1..22: mol_type = other RNA
cccgcgggccgcatgggaccca

SEQ ID NO: 23447 - RNA, 22 nt, synthetic construct
  source 1..22: mol_type = other RNA
cccgcgggttagacaacttgct

SEQ ID NO: 23448 - RNA, 22 nt, synthetic construct
  source 1..22: mol_type = other RNA
cccggacttgttctgtggatta

SEQ ID NO: 23449 - RNA, 22 nt, synthetic construct
  source 1..22: mol_type = other RNA
ccctaccaggcatcttagcaac

SEQ ID NO: 23450 - RNA, 22 nt, synthetic construct
  source 1..22: mol_type = other RNA
ccctagttcacgttcttaaatg

SEQ ID NO: 23451 - RNA, 22 nt, synthetic construct
  source 1..22: mol_type = other RNA
ccctcaccctctctccccaggc

SEQ ID NO: 23452 - RNA, 22 nt, synthetic construct
  source 1..22: mol_type = other RNA
ccctccctcaccctctctcccc

SEQ ID NO: 23453 - RNA, 22 nt, synthetic construct
  source 1..22: mol_type = other RNA
ccctctctccccaggctctcta

SEQ ID NO: 23454 - RNA, 22 nt, synthetic construct
  source 1..22: mol_type = other RNA
ccctctcttgatcttgggtagc

SEQ ID NO: 23455 - RNA, 22 nt, synthetic construct
  source 1..22: mol_type = other RNA
ccctgaccgtcttcacagtcca

SEQ ID NO: 23456 - RNA, 22 nt, synthetic construct
  source 1..22: mol_type = other RNA
ccctggatagactttcctcaat

SEQ ID NO: 23457 - RNA, 22 nt, synthetic construct
  source 1..22: mol_type = other RNA
ccctgggccacactgcaagaac

SEQ ID NO: 23458 - RNA, 22 nt, synthetic construct
  source 1..22: mol_type = other RNA
ccctggtttacaggatgaattc

SEQ ID NO: 23459 - RNA, 22 nt, synthetic construct
  source 1..22: mol_type = other RNA
cccttgctgcaccaccaaagtg

SEQ ID NO: 23460 - RNA, 22 nt, synthetic construct
  source 1..22: mol_type = other RNA
cccttgctgcttttaatcctgc

SEQ ID NO: 23461 - RNA, 22 nt, synthetic construct
  source 1..22: mol_type = other RNA
ccctttgcatccctaccaggca

SEQ ID NO: 23462 - RNA, 22 nt, synthetic construct
  source 1..22: mol_type = other RNA
ccctttggtcatgccttccatg

SEQ ID NO: 23463 - RNA, 22 nt, synthetic construct
  source 1..22: mol_type = other RNA
cccttttaaaaaagcagttttc

SEQ ID NO: 23464 - RNA, 22 nt, synthetic construct
  source 1..22: mol_type = other RNA
ccctttttcttcctctaaatac

SEQ ID NO: 23465 - RNA, 22 nt, synthetic construct
  source 1..22: mol_type = other RNA
ccgaaagattggacacccctgg

SEQ ID NO: 23466 - RNA, 22 nt, synthetic construct
  source 1..22: mol_type = other RNA
ccgcatgggacccaggacagct

SEQ ID NO: 23467 - RNA, 22 nt, synthetic construct
  source 1..22: mol_type = other RNA
ccgcgggccgcatgggacccag

SEQ ID NO: 23468 - RNA, 22 nt, synthetic construct
  source 1..22: mol_type = other RNA
ccgcgggttagacaacttgctg

SEQ ID NO: 23469 - RNA, 22 nt, synthetic construct
  source 1..22: mol_type = other RNA
ccggacttgttctgtggattac

SEQ ID NO: 23470 - RNA, 22 nt, synthetic construct
  source 1..22: mol_type = other RNA
ccggggctacagctatactgtc

SEQ ID NO: 23471 - RNA, 22 nt, synthetic construct
  source 1..22: mol_type = other RNA
ccgtcttcacagtccaggtgat

SEQ ID NO: 23472 - RNA, 22 nt, synthetic construct
  source 1..22: mol_type = other RNA
cctaaaactttaagaaagttta

SEQ ID NO: 23473 - RNA, 22 nt, synthetic construct
  source 1..22: mol_type = other RNA
cctaaaggaagatagagcatga

SEQ ID NO: 23474 - RNA, 22 nt, synthetic construct
  source 1..22: mol_type = other RNA
cctaaatttctgtcctacaagt

SEQ ID NO: 23475 - RNA, 22 nt, synthetic construct
  source 1..22: mol_type = other RNA
cctaacaagatgtaagatggat

SEQ ID NO: 23476 - RNA, 22 nt, synthetic construct
  source 1..22: mol_type = other RNA
cctaacctcagatccaattctc

SEQ ID NO: 23477 - RNA, 22 nt, synthetic construct
  source 1..22: mol_type = other RNA
cctacaagttttcacttcctgg

SEQ ID NO: 23478 - RNA, 22 nt, synthetic construct
  source 1..22: mol_type = other RNA
cctaccaggcatcttagcaact

SEQ ID NO: 23479 - RNA, 22 nt, synthetic construct
  source 1..22: mol_type = other RNA
cctagtatactctgatgtctag

SEQ ID NO: 23480 - RNA, 22 nt, synthetic construct
  source 1..22: mol_type = other RNA
cctagttcacgttcttaaatgt

SEQ ID NO: 23481 - RNA, 22 nt, synthetic construct
  source 1..22: mol_type = other RNA
cctattcttcattcaagttctg

SEQ ID NO: 23482 - RNA, 22 nt, synthetic construct
  source 1..22: mol_type = other RNA
cctcaatttaacagctttttca

SEQ ID NO: 23483 - RNA, 22 nt, synthetic construct
  source 1..22: mol_type = other RNA
cctcaccctctctccccaggct

SEQ ID NO: 23484 - RNA, 22 nt, synthetic construct
  source 1..22: mol_type = other RNA
cctcagatccaattctctgtaa

SEQ ID NO: 23485 - RNA, 22 nt, synthetic construct
  source 1..22: mol_type = other RNA
cctcaggataaaacttactttg

SEQ ID NO: 23486 - RNA, 22 nt, synthetic construct
  source 1..22: mol_type = other RNA
cctccaatcaagtgtttccagg

SEQ ID NO: 23487 - RNA, 22 nt, synthetic construct
  source 1..22: mol_type = other RNA
cctccctagttcacgttcttaa

SEQ ID NO: 23488 - RNA, 22 nt, synthetic construct
  source 1..22: mol_type = other RNA
cctccctcaccctctctcccca

SEQ ID NO: 23489 - RNA, 22 nt, synthetic construct
  source 1..22: mol_type = other RNA
cctctaaatacctctcatttct

SEQ ID NO: 23490 - RNA, 22 nt, synthetic construct
  source 1..22: mol_type = other RNA
cctctagtattcagacatagca

SEQ ID NO: 23491 - RNA, 22 nt, synthetic construct
  source 1..22: mol_type = other RNA
cctctcatttctgttcttacca

SEQ ID NO: 23492 - RNA, 22 nt, synthetic construct
  source 1..22: mol_type = other RNA
cctctctccccaggctctctac

SEQ ID NO: 23493 - RNA, 22 nt, synthetic construct
  source 1..22: mol_type = other RNA
cctctctcctgaagtcacatgg

SEQ ID NO: 23494 - RNA, 22 nt, synthetic construct
  source 1..22: mol_type = other RNA
cctctcttgatcttgggtagcc

SEQ ID NO: 23495 - RNA, 22 nt, synthetic construct
  source 1..22: mol_type = other RNA
cctgaagtcacatggaatgaat

SEQ ID NO: 23496 - RNA, 22 nt, synthetic construct
  source 1..22: mol_type = other RNA
cctgaccgtcttcacagtccag

SEQ ID NO: 23497 - RNA, 22 nt, synthetic construct
  source 1..22: mol_type = other RNA
cctgagcagtttgtactgcgtg

SEQ ID NO: 23498 - RNA, 22 nt, synthetic construct
  source 1..22: mol_type = other RNA
cctgagctcctagtatactctg

SEQ ID NO: 23499 - RNA, 22 nt, synthetic construct
  source 1..22: mol_type = other RNA
cctgaggaattataataccaac

SEQ ID NO: 23500 - RNA, 22 nt, synthetic construct
  source 1..22: mol_type = other RNA
cctgagttttataccatttgag

SEQ ID NO: 23501 - RNA, 22 nt, synthetic construct
  source 1..22: mol_type = other RNA
cctgatgctacactttggtggt

SEQ ID NO: 23502 - RNA, 22 nt, synthetic construct
  source 1..22: mol_type = other RNA
cctgcagattcaaatgtcatct

SEQ ID NO: 23503 - RNA, 22 nt, synthetic construct
  source 1..22: mol_type = other RNA
cctgccttggacaacagtgaaa

SEQ ID NO: 23504 - RNA, 22 nt, synthetic construct
  source 1..22: mol_type = other RNA
cctggaaacacttgattggagg

SEQ ID NO: 23505 - RNA, 22 nt, synthetic construct
  source 1..22: mol_type = other RNA
cctggactgtgaagacggtcag

SEQ ID NO: 23506 - RNA, 22 nt, synthetic construct
  source 1..22: mol_type = other RNA
cctggatagactttcctcaatt

SEQ ID NO: 23507 - RNA, 22 nt, synthetic construct
  source 1..22: mol_type = other RNA
cctgggccacactgcaagaact

SEQ ID NO: 23508 - RNA, 22 nt, synthetic construct
  source 1..22: mol_type = other RNA
cctggggagagagggtgaggga

SEQ ID NO: 23509 - RNA, 22 nt, synthetic construct
  source 1..22: mol_type = other RNA
cctgggtcccatgcggcccgcg

SEQ ID NO: 23510 - RNA, 22 nt, synthetic construct
  source 1..22: mol_type = other RNA
cctggtagggatgcaaaggggt

SEQ ID NO: 23511 - RNA, 22 nt, synthetic construct
  source 1..22: mol_type = other RNA
cctggtgtctcgcgaaaccaga

SEQ ID NO: 23512 - RNA, 22 nt, synthetic construct
  source 1..22: mol_type = other RNA
cctggtttacaggatgaattct

SEQ ID NO: 23513 - RNA, 22 nt, synthetic construct
  source 1..22: mol_type = other RNA
cctgtaaaccaggggtgtccaa

SEQ ID NO: 23514 - RNA, 22 nt, synthetic construct
  source 1..22: mol_type = other RNA
cctgtaacagtttaatggaatc

SEQ ID NO: 23515 - RNA, 22 nt, synthetic construct
  source 1..22: mol_type = other RNA
cctgtcattttcatgctctatc

SEQ ID NO: 23516 - RNA, 22 nt, synthetic construct
  source 1..22: mol_type = other RNA
cctgtgtgatagcttccaaatt

SEQ ID NO: 23517 - RNA, 22 nt, synthetic construct
  source 1..22: mol_type = other RNA
ccttaactattctgagcttttt

SEQ ID NO: 23518 - RNA, 22 nt, synthetic construct
  source 1..22: mol_type = other RNA
ccttaatttgtggtggaaccaa

SEQ ID NO: 23519 - RNA, 22 nt, synthetic construct
  source 1..22: mol_type = other RNA
ccttactgctcagtaaaaagag

SEQ ID NO: 23520 - RNA, 22 nt, synthetic construct
  source 1..22: mol_type = other RNA
ccttagctgggattctgtccct

SEQ ID NO: 23521 - RNA, 22 nt, synthetic construct
  source 1..22: mol_type = other RNA
ccttatgcatcacattcacgag

SEQ ID NO: 23522 - RNA, 22 nt, synthetic construct
  source 1..22: mol_type = other RNA
ccttcaaaaagctcagaatagt

SEQ ID NO: 23523 - RNA, 22 nt, synthetic construct
  source 1..22: mol_type = other RNA
ccttccatggtctgttgttcta

SEQ ID NO: 23524 - RNA, 22 nt, synthetic construct
  source 1..22: mol_type = other RNA
ccttgctgcaccaccaaagtgt

SEQ ID NO: 23525 - RNA, 22 nt, synthetic construct
  source 1..22: mol_type = other RNA
ccttgctgcttttaatcctgca

SEQ ID NO: 23526 - RNA, 22 nt, synthetic construct
  source 1..22: mol_type = other RNA
ccttggacaacagtgaaagcaa

SEQ ID NO: 23527 - RNA, 22 nt, synthetic construct
  source 1..22: mol_type = other RNA
cctttaggacaatcatcctaac

SEQ ID NO: 23528 - RNA, 22 nt, synthetic construct
  source 1..22: mol_type = other RNA
cctttatatgtggcccaagaca

SEQ ID NO: 23529 - RNA, 22 nt, synthetic construct
  source 1..22: mol_type = other RNA
cctttgcatccctaccaggcat

SEQ ID NO: 23530 - RNA, 22 nt, synthetic construct
  source 1..22: mol_type = other RNA
cctttggtcatgccttccatgg

SEQ ID NO: 23531 - RNA, 22 nt, synthetic construct
  source 1..22: mol_type = other RNA
ccttttaaaaaagcagttttct

SEQ ID NO: 23532 - RNA, 22 nt, synthetic construct
  source 1..22: mol_type = other RNA
cctttttccttagctgggattc

SEQ ID NO: 23533 - RNA, 22 nt, synthetic construct
  source 1..22: mol_type = other RNA
cctttttcttcctctaaatacc

SEQ ID NO: 23534 - RNA, 22 nt, synthetic construct
  source 1..22: mol_type = other RNA
cgaaaccagacagattggttcc

SEQ ID NO: 23535 - RNA, 22 nt, synthetic construct
  source 1..22: mol_type = other RNA
cgaaagattggacacccctggt

SEQ ID NO: 23536 - RNA, 22 nt, synthetic construct
  source 1..22: mol_type = other RNA
cgacatgtaaatgtctttatgg

SEQ ID NO: 23537 - RNA, 22 nt, synthetic construct
  source 1..22: mol_type = other RNA
cgagaacagaattcatcctgta

SEQ ID NO: 23538 - RNA, 22 nt, synthetic construct
  source 1..22: mol_type = other RNA
cgagacaccaggctacccaaga

SEQ ID NO: 23539 - RNA, 22 nt, synthetic construct
  source 1..22: mol_type = other RNA
cgagactgcggattatcactac

SEQ ID NO: 23540 - RNA, 22 nt, synthetic construct
  source 1..22: mol_type = other RNA
cgcagtacaaactgctcaggag

SEQ ID NO: 23541 - RNA, 22 nt, synthetic construct
  source 1..22: mol_type = other RNA
cgcatgggacccaggacagctt

SEQ ID NO: 23542 - RNA, 22 nt, synthetic construct
  source 1..22: mol_type = other RNA
cgcattcaaagctgtcctgggt

SEQ ID NO: 23543 - RNA, 22 nt, synthetic construct
  source 1..22: mol_type = other RNA
cgcgaaaccagacagattggtt

SEQ ID NO: 23544 - RNA, 22 nt, synthetic construct
  source 1..22: mol_type = other RNA
cgcgagacaccaggctacccaa

SEQ ID NO: 23545 - RNA, 22 nt, synthetic construct
  source 1..22: mol_type = other RNA
cgcgggccgcatgggacccagg

SEQ ID NO: 23546 - RNA, 22 nt, synthetic construct
  source 1..22: mol_type = other RNA
cgcgggttagacaacttgctgt

SEQ ID NO: 23547 - RNA, 22 nt, synthetic construct
  source 1..22: mol_type = other RNA
cgctcactccatttacttaaag

SEQ ID NO: 23548 - RNA, 22 nt, synthetic construct
  source 1..22: mol_type = other RNA
cgcttgctttcactgttgtcca

SEQ ID NO: 23549 - RNA, 22 nt, synthetic construct
  source 1..22: mol_type = other RNA
cggacttgttctgtggattaca

SEQ ID NO: 23550 - RNA, 22 nt, synthetic construct
  source 1..22: mol_type = other RNA
cggattatcactacttatcatt

SEQ ID NO: 23551 - RNA, 22 nt, synthetic construct
  source 1..22: mol_type = other RNA
cggcccgcgggttagacaactt

SEQ ID NO: 23552 - RNA, 22 nt, synthetic construct
  source 1..22: mol_type = other RNA
cggcttccctgggccacactgc

SEQ ID NO: 23553 - RNA, 22 nt, synthetic construct
  source 1..22: mol_type = other RNA
cgggccgcatgggacccaggac

SEQ ID NO: 23554 - RNA, 22 nt, synthetic construct
  source 1..22: mol_type = other RNA
cggggctacagctatactgtcc

SEQ ID NO: 23555 - RNA, 22 nt, synthetic construct
  source 1..22: mol_type = other RNA
cgggttagacaacttgctgtaa

SEQ ID NO: 23556 - RNA, 22 nt, synthetic construct
  source 1..22: mol_type = other RNA
cggtcagggacagaatcccagc

SEQ ID NO: 23557 - RNA, 22 nt, synthetic construct
  source 1..22: mol_type = other RNA
cgtaaactttcttaaagtttta

SEQ ID NO: 23558 - RNA, 22 nt, synthetic construct
  source 1..22: mol_type = other RNA
cgtattctgtaatccacagaac

SEQ ID NO: 23559 - RNA, 22 nt, synthetic construct
  source 1..22: mol_type = other RNA
cgtcatatatctttgtggggtg

SEQ ID NO: 23560 - RNA, 22 nt, synthetic construct
  source 1..22: mol_type = other RNA
cgtctctatgatttgggtaact

SEQ ID NO: 23561 - RNA, 22 nt, synthetic construct
  source 1..22: mol_type = other RNA
cgtcttcacagtccaggtgatc

SEQ ID NO: 23562 - RNA, 22 nt, synthetic construct
  source 1..22: mol_type = other RNA
cgtgaactagggaggaataaaa

SEQ ID NO: 23563 - RNA, 22 nt, synthetic construct
  source 1..22: mol_type = other RNA
cgtgaatgtgatgcataaggtc

SEQ ID NO: 23564 - RNA, 22 nt, synthetic construct
  source 1..22: mol_type = other RNA
cgtggacattgatggttttctc

SEQ ID NO: 23565 - RNA, 22 nt, synthetic construct
  source 1..22: mol_type = other RNA
cgtgggtcatagtaattctggg

SEQ ID NO: 23566 - RNA, 22 nt, synthetic construct
  source 1..22: mol_type = other RNA
ctaaagacagagacagcaattt

SEQ ID NO: 23567 - RNA, 22 nt, synthetic construct
  source 1..22: mol_type = other RNA
ctaaaggaagatagagcatgaa

SEQ ID NO: 23568 - RNA, 22 nt, synthetic construct
  source 1..22: mol_type = other RNA
ctaaatacctctcatttctgtt

SEQ ID NO: 23569 - RNA, 22 nt, synthetic construct
  source 1..22: mol_type = other RNA
ctaaatttctgtcctacaagtt

SEQ ID NO: 23570 - RNA, 22 nt, synthetic construct
  source 1..22: mol_type = other RNA
ctaacaagatgtaagatggatc

SEQ ID NO: 23571 - RNA, 22 nt, synthetic construct
  source 1..22: mol_type = other RNA
ctaacccgcgggccgcatggga

SEQ ID NO: 23572 - RNA, 22 nt, synthetic construct
  source 1..22: mol_type = other RNA
ctaacctcagatccaattctct

SEQ ID NO: 23573 - RNA, 22 nt, synthetic construct
  source 1..22: mol_type = other RNA
ctaactggtaagaacagaaatg

SEQ ID NO: 23574 - RNA, 22 nt, synthetic construct
  source 1..22: mol_type = other RNA
ctaagatgcctggtagggatgc

SEQ ID NO: 23575 - RNA, 22 nt, synthetic construct
  source 1..22: mol_type = other RNA
ctaagcatcatatcttgagtta

SEQ ID NO: 23576 - RNA, 22 nt, synthetic construct
  source 1..22: mol_type = other RNA
ctaaggaaaaaggataaaatga

SEQ ID NO: 23577 - RNA, 22 nt, synthetic construct
  source 1..22: mol_type = other RNA
ctaagtccaacaaaccattttt

SEQ ID NO: 23578 - RNA, 22 nt, synthetic construct
  source 1..22: mol_type = other RNA
ctaatttgaattgcaactgtgg

SEQ ID NO: 23579 - RNA, 22 nt, synthetic construct
  source 1..22: mol_type = other RNA
ctacaagttttcacttcctgga

SEQ ID NO: 23580 - RNA, 22 nt, synthetic construct
  source 1..22: mol_type = other RNA
ctacacacacaaatatgacctc

SEQ ID NO: 23581 - RNA, 22 nt, synthetic construct
  source 1..22: mol_type = other RNA
ctacactttggtggtgcagcaa

SEQ ID NO: 23582 - RNA, 22 nt, synthetic construct
  source 1..22: mol_type = other RNA
ctacagctatactgtccacagt

SEQ ID NO: 23583 - RNA, 22 nt, synthetic construct
  source 1..22: mol_type = other RNA
ctaccaggcatcttagcaactc

SEQ ID NO: 23584 - RNA, 22 nt, synthetic construct
  source 1..22: mol_type = other RNA
ctacccaagatcaagagaggga

SEQ ID NO: 23585 - RNA, 22 nt, synthetic construct
  source 1..22: mol_type = other RNA
ctacccctttgcatccctacca

SEQ ID NO: 23586 - RNA, 22 nt, synthetic construct
  source 1..22: mol_type = other RNA
ctacccttgctgcttttaatcc

SEQ ID NO: 23587 - RNA, 22 nt, synthetic construct
  source 1..22: mol_type = other RNA
ctactgctttacagagaattgg

SEQ ID NO: 23588 - RNA, 22 nt, synthetic construct
  source 1..22: mol_type = other RNA
ctacttatcatttttggagcat

SEQ ID NO: 23589 - RNA, 22 nt, synthetic construct
  source 1..22: mol_type = other RNA
ctagaaaaatgctccaaaaatg

SEQ ID NO: 23590 - RNA, 22 nt, synthetic construct
  source 1..22: mol_type = other RNA
ctagacatcagagtatactagg

SEQ ID NO: 23591 - RNA, 22 nt, synthetic construct
  source 1..22: mol_type = other RNA
ctagagacagacataaagcatg

SEQ ID NO: 23592 - RNA, 22 nt, synthetic construct
  source 1..22: mol_type = other RNA
ctagaggagcaagtacaacaaa

SEQ ID NO: 23593 - RNA, 22 nt, synthetic construct
  source 1..22: mol_type = other RNA
ctagccaactttaagtaaatgg

SEQ ID NO: 23594 - RNA, 22 nt, synthetic construct
  source 1..22: mol_type = other RNA
ctagctttctccctctcttgat

SEQ ID NO: 23595 - RNA, 22 nt, synthetic construct
  source 1..22: mol_type = other RNA
ctaggagctcaggagtacaaga

SEQ ID NO: 23596 - RNA, 22 nt, synthetic construct
  source 1..22: mol_type = other RNA
ctagggaggaataaaagcactg

SEQ ID NO: 23597 - RNA, 22 nt, synthetic construct
  source 1..22: mol_type = other RNA
ctagtatactctgatgtctagc

SEQ ID NO: 23598 - RNA, 22 nt, synthetic construct
  source 1..22: mol_type = other RNA
ctagtattcagacatagcacta

SEQ ID NO: 23599 - RNA, 22 nt, synthetic construct
  source 1..22: mol_type = other RNA
ctagtgctatgtctgaatacta

SEQ ID NO: 23600 - RNA, 22 nt, synthetic construct
  source 1..22: mol_type = other RNA
ctagttcacgttcttaaatgtt

SEQ ID NO: 23601 - RNA, 22 nt, synthetic construct
  source 1..22: mol_type = other RNA
ctataactcaagatatgatgct

SEQ ID NO: 23602 - RNA, 22 nt, synthetic construct
  source 1..22: mol_type = other RNA
ctatactgtccacagttgcaat

SEQ ID NO: 23603 - RNA, 22 nt, synthetic construct
  source 1..22: mol_type = other RNA
ctatcacacaggcatctgagat

SEQ ID NO: 23604 - RNA, 22 nt, synthetic construct
  source 1..22: mol_type = other RNA
ctatccagggaccttatgcatc

SEQ ID NO: 23605 - RNA, 22 nt, synthetic construct
  source 1..22: mol_type = other RNA
ctatcttcctttaggacaatca

SEQ ID NO: 23606 - RNA, 22 nt, synthetic construct
  source 1..22: mol_type = other RNA
ctatgacccaaactgccctttt

SEQ ID NO: 23607 - RNA, 22 nt, synthetic construct
  source 1..22: mol_type = other RNA
ctatgacccacgcagtacaaac

SEQ ID NO: 23608 - RNA, 22 nt, synthetic construct
  source 1..22: mol_type = other RNA
ctatgatttgggtaactgcaat

SEQ ID NO: 23609 - RNA, 22 nt, synthetic construct
  source 1..22: mol_type = other RNA
ctatgtagctcctgtaacagtt

SEQ ID NO: 23610 - RNA, 22 nt, synthetic construct
  source 1..22: mol_type = other RNA
ctatgtctgaatactagaggag

SEQ ID NO: 23611 - RNA, 22 nt, synthetic construct
  source 1..22: mol_type = other RNA
ctattaagatttaacctgatgc

SEQ ID NO: 23612 - RNA, 22 nt, synthetic construct
  source 1..22: mol_type = other RNA
ctattccttcaaaaagctcaga

SEQ ID NO: 23613 - RNA, 22 nt, synthetic construct
  source 1..22: mol_type = other RNA
ctattctgagctttttgaagga

SEQ ID NO: 23614 - RNA, 22 nt, synthetic construct
  source 1..22: mol_type = other RNA
ctattttccacatactacacac

SEQ ID NO: 23615 - RNA, 22 nt, synthetic construct
  source 1..22: mol_type = other RNA
ctcaaatggtataaaactcagg

SEQ ID NO: 23616 - RNA, 22 nt, synthetic construct
  source 1..22: mol_type = other RNA
ctcaagatatgatgcttagagc

SEQ ID NO: 23617 - RNA, 22 nt, synthetic construct
  source 1..22: mol_type = other RNA
ctcaagccttaatttgtggtgg

SEQ ID NO: 23618 - RNA, 22 nt, synthetic construct
  source 1..22: mol_type = other RNA
ctcaatttaacagctttttcat

SEQ ID NO: 23619 - RNA, 22 nt, synthetic construct
  source 1..22: mol_type = other RNA
ctcaccctctctccccaggctc

SEQ ID NO: 23620 - RNA, 22 nt, synthetic construct
  source 1..22: mol_type = other RNA
ctcacctccctaaaattcatta

SEQ ID NO: 23621 - RNA, 22 nt, synthetic construct
  source 1..22: mol_type = other RNA
ctcactcatacttgatcccatt

SEQ ID NO: 23622 - RNA, 22 nt, synthetic construct
  source 1..22: mol_type = other RNA
ctcactccatttacttaaagtt

SEQ ID NO: 23623 - RNA, 22 nt, synthetic construct
  source 1..22: mol_type = other RNA
ctcagaatagttaaggtaattt

SEQ ID NO: 23624 - RNA, 22 nt, synthetic construct
  source 1..22: mol_type = other RNA
ctcagatccaattctctgtaaa

SEQ ID NO: 23625 - RNA, 22 nt, synthetic construct
  source 1..22: mol_type = other RNA
ctcagatgcctgtgtgatagct

SEQ ID NO: 23626 - RNA, 22 nt, synthetic construct
  source 1..22: mol_type = other RNA
ctcaggagtacaagacactatt

SEQ ID NO: 23627 - RNA, 22 nt, synthetic construct
  source 1..22: mol_type = other RNA
ctcaggagtcagaagaaaactg

SEQ ID NO: 23628 - RNA, 22 nt, synthetic construct
  source 1..22: mol_type = other RNA
ctcaggataaaacttactttgt

SEQ ID NO: 23629 - RNA, 22 nt, synthetic construct
  source 1..22: mol_type = other RNA
ctcaggtgatcatgctttatgt

SEQ ID NO: 23630 - RNA, 22 nt, synthetic construct
  source 1..22: mol_type = other RNA
ctcagtaaaaagagaaaaccat

SEQ ID NO: 23631 - RNA, 22 nt, synthetic construct
  source 1..22: mol_type = other RNA
ctcatacttgatcccattttcc

SEQ ID NO: 23632 - RNA, 22 nt, synthetic construct
  source 1..22: mol_type = other RNA
ctcatcagctgtcctttatatg

SEQ ID NO: 23633 - RNA, 22 nt, synthetic construct
  source 1..22: mol_type = other RNA
ctcattaacgcttgctttcact

SEQ ID NO: 23634 - RNA, 22 nt, synthetic construct
  source 1..22: mol_type = other RNA
ctcatttctgttcttaccagtt

SEQ ID NO: 23635 - RNA, 22 nt, synthetic construct
  source 1..22: mol_type = other RNA
ctccaaaaatgataagtagtga

SEQ ID NO: 23636 - RNA, 22 nt, synthetic construct
  source 1..22: mol_type = other RNA
ctccaatcaagtgtttccagga

SEQ ID NO: 23637 - RNA, 22 nt, synthetic construct
  source 1..22: mol_type = other RNA
ctccattactggcttgtactgt

SEQ ID NO: 23638 - RNA, 22 nt, synthetic construct
  source 1..22: mol_type = other RNA
ctccatttacttaaagttggct

SEQ ID NO: 23639 - RNA, 22 nt, synthetic construct
  source 1..22: mol_type = other RNA
ctccccaggctctctacccctt

SEQ ID NO: 23640 - RNA, 22 nt, synthetic construct
  source 1..22: mol_type = other RNA
ctcccctttggtcatgccttcc

SEQ ID NO: 23641 - RNA, 22 nt, synthetic construct
  source 1..22: mol_type = other RNA
ctccctagttcacgttcttaaa

SEQ ID NO: 23642 - RNA, 22 nt, synthetic construct
  source 1..22: mol_type = other RNA
ctccctcaccctctctccccag

SEQ ID NO: 23643 - RNA, 22 nt, synthetic construct
  source 1..22: mol_type = other RNA
ctccctctcttgatcttgggta

SEQ ID NO: 23644 - RNA, 22 nt, synthetic construct
  source 1..22: mol_type = other RNA
ctccctttttcttcctctaaat

SEQ ID NO: 23645 - RNA, 22 nt, synthetic construct
  source 1..22: mol_type = other RNA
ctcctaaaactttaagaaagtt

SEQ ID NO: 23646 - RNA, 22 nt, synthetic construct
  source 1..22: mol_type = other RNA
ctcctagtatactctgatgtct

SEQ ID NO: 23647 - RNA, 22 nt, synthetic construct
  source 1..22: mol_type = other RNA
ctcctccaatcaagtgtttcca

SEQ ID NO: 23648 - RNA, 22 nt, synthetic construct
  source 1..22: mol_type = other RNA
ctcctctagtattcagacatag

SEQ ID NO: 23649 - RNA, 22 nt, synthetic construct
  source 1..22: mol_type = other RNA
ctcctgaagtcacatggaatga

SEQ ID NO: 23650 - RNA, 22 nt, synthetic construct
  source 1..22: mol_type = other RNA
ctcctgagcagtttgtactgcg

SEQ ID NO: 23651 - RNA, 22 nt, synthetic construct
  source 1..22: mol_type = other RNA
ctcctgagctcctagtatactc

SEQ ID NO: 23652 - RNA, 22 nt, synthetic construct
  source 1..22: mol_type = other RNA
ctcctgtaacagtttaatggaa

SEQ ID NO: 23653 - RNA, 22 nt, synthetic construct
  source 1..22: mol_type = other RNA
ctcgcgaaaccagacagattgg

SEQ ID NO: 23654 - RNA, 22 nt, synthetic construct
  source 1..22: mol_type = other RNA
ctcgtgaatgtgatgcataagg

SEQ ID NO: 23655 - RNA, 22 nt, synthetic construct
  source 1..22: mol_type = other RNA
ctctaaatacctctcatttctg

SEQ ID NO: 23656 - RNA, 22 nt, synthetic construct
  source 1..22: mol_type = other RNA
ctctaagcatcatatcttgagt

SEQ ID NO: 23657 - RNA, 22 nt, synthetic construct
  source 1..22: mol_type = other RNA
ctctacccctttgcatccctac

SEQ ID NO: 23658 - RNA, 22 nt, synthetic construct
  source 1..22: mol_type = other RNA
ctctagaaaaatgctccaaaaa

SEQ ID NO: 23659 - RNA, 22 nt, synthetic construct
  source 1..22: mol_type = other RNA
ctctagtattcagacatagcac

SEQ ID NO: 23660 - RNA, 22 nt, synthetic construct
  source 1..22: mol_type = other RNA
ctctatcttcctttaggacaat

SEQ ID NO: 23661 - RNA, 22 nt, synthetic construct
  source 1..22: mol_type = other RNA
ctctatgatttgggtaactgca

SEQ ID NO: 23662 - RNA, 22 nt, synthetic construct
  source 1..22: mol_type = other RNA
ctctcactcatacttgatccca

SEQ ID NO: 23663 - RNA, 22 nt, synthetic construct
  source 1..22: mol_type = other RNA
ctctcatttctgttcttaccag

SEQ ID NO: 23664 - RNA, 22 nt, synthetic construct
  source 1..22: mol_type = other RNA
ctctccccaggctctctacccc

SEQ ID NO: 23665 - RNA, 22 nt, synthetic construct
  source 1..22: mol_type = other RNA
ctctcctgaagtcacatggaat

SEQ ID NO: 23666 - RNA, 22 nt, synthetic construct
  source 1..22: mol_type = other RNA
ctctctacccctttgcatccct

SEQ ID NO: 23667 - RNA, 22 nt, synthetic construct
  source 1..22: mol_type = other RNA
ctctctccccaggctctctacc

SEQ ID NO: 23668 - RNA, 22 nt, synthetic construct
  source 1..22: mol_type = other RNA
ctctctcctgaagtcacatgga

SEQ ID NO: 23669 - RNA, 22 nt, synthetic construct
  source 1..22: mol_type = other RNA
ctctctggcccattacatttca

SEQ ID NO: 23670 - RNA, 22 nt, synthetic construct
  source 1..22: mol_type = other RNA
ctctcttgatcttgggtagcct

SEQ ID NO: 23671 - RNA, 22 nt, synthetic construct
  source 1..22: mol_type = other RNA
ctctgatgtctagccaacttta

SEQ ID NO: 23672 - RNA, 22 nt, synthetic construct
  source 1..22: mol_type = other RNA
ctctggcccattacatttcatt

SEQ ID NO: 23673 - RNA, 22 nt, synthetic construct
  source 1..22: mol_type = other RNA
ctctgtaaagcagtagtcaaga

SEQ ID NO: 23674 - RNA, 22 nt, synthetic construct
  source 1..22: mol_type = other RNA
ctctgtctttagtgttatcttt

SEQ ID NO: 23675 - RNA, 22 nt, synthetic construct
  source 1..22: mol_type = other RNA
ctcttacccagcagtgctttta

SEQ ID NO: 23676 - RNA, 22 nt, synthetic construct
  source 1..22: mol_type = other RNA
ctcttgatcttgggtagcctgg

SEQ ID NO: 23677 - RNA, 22 nt, synthetic construct
  source 1..22: mol_type = other RNA
ctctttttactgagcagtaagg

SEQ ID NO: 23678 - RNA, 22 nt, synthetic construct
  source 1..22: mol_type = other RNA
ctgaaagctaagtccaacaaac

SEQ ID NO: 23679 - RNA, 22 nt, synthetic construct
  source 1..22: mol_type = other RNA
ctgaagctctctggcccattac

SEQ ID NO: 23680 - RNA, 22 nt, synthetic construct
  source 1..22: mol_type = other RNA
ctgaagtcacatggaatgaatt

SEQ ID NO: 23681 - RNA, 22 nt, synthetic construct
  source 1..22: mol_type = other RNA
ctgaatactagaggagcaagta

SEQ ID NO: 23682 - RNA, 22 nt, synthetic construct
  source 1..22: mol_type = other RNA
ctgaccgtcttcacagtccagg

SEQ ID NO: 23683 - RNA, 22 nt, synthetic construct
  source 1..22: mol_type = other RNA
ctgactcctgagcagtttgtac

SEQ ID NO: 23684 - RNA, 22 nt, synthetic construct
  source 1..22: mol_type = other RNA
ctgagatcagttactaactggt

SEQ ID NO: 23685 - RNA, 22 nt, synthetic construct
  source 1..22: mol_type = other RNA
ctgagcagtaaggaaataaaag

SEQ ID NO: 23686 - RNA, 22 nt, synthetic construct
  source 1..22: mol_type = other RNA
ctgagcagtttgtactgcgtgg

SEQ ID NO: 23687 - RNA, 22 nt, synthetic construct
  source 1..22: mol_type = other RNA
ctgagctcctagtatactctga

SEQ ID NO: 23688 - RNA, 22 nt, synthetic construct
  source 1..22: mol_type = other RNA
ctgagctttttgaaggaatagt

SEQ ID NO: 23689 - RNA, 22 nt, synthetic construct
  source 1..22: mol_type = other RNA
ctgaggaattataataccaaca

SEQ ID NO: 23690 - RNA, 22 nt, synthetic construct
  source 1..22: mol_type = other RNA
ctgaggttaggcaacatctccc

SEQ ID NO: 23691 - RNA, 22 nt, synthetic construct
  source 1..22: mol_type = other RNA
ctgagttttataccatttgaga

SEQ ID NO: 23692 - RNA, 22 nt, synthetic construct
  source 1..22: mol_type = other RNA
ctgatatatttaactatgtagc

SEQ ID NO: 23693 - RNA, 22 nt, synthetic construct
  source 1..22: mol_type = other RNA
ctgatctcagatgcctgtgtga

SEQ ID NO: 23694 - RNA, 22 nt, synthetic construct
  source 1..22: mol_type = other RNA
ctgatgctacactttggtggtg

SEQ ID NO: 23695 - RNA, 22 nt, synthetic construct
  source 1..22: mol_type = other RNA
ctgatgtctagccaactttaag

SEQ ID NO: 23696 - RNA, 22 nt, synthetic construct
  source 1..22: mol_type = other RNA
ctgatttaaattaccttaacta

SEQ ID NO: 23697 - RNA, 22 nt, synthetic construct
  source 1..22: mol_type = other RNA
ctgcaagaactgtcttgggcca

SEQ ID NO: 23698 - RNA, 22 nt, synthetic construct
  source 1..22: mol_type = other RNA
ctgcaattcattccatgtgact

SEQ ID NO: 23699 - RNA, 22 nt, synthetic construct
  source 1..22: mol_type = other RNA
ctgcaccaccaaagtgtagcat

SEQ ID NO: 23700 - RNA, 22 nt, synthetic construct
  source 1..22: mol_type = other RNA
ctgcagattcaaatgtcatctc

SEQ ID NO: 23701 - RNA, 22 nt, synthetic construct
  source 1..22: mol_type = other RNA
ctgcaggattaaaagcagcaag

SEQ ID NO: 23702 - RNA, 22 nt, synthetic construct
  source 1..22: mol_type = other RNA
ctgcccttttaaaaaagcagtt

SEQ ID NO: 23703 - RNA, 22 nt, synthetic construct
  source 1..22: mol_type = other RNA
ctgccttggacaacagtgaaag

SEQ ID NO: 23704 - RNA, 22 nt, synthetic construct
  source 1..22: mol_type = other RNA
ctgcggattatcactacttatc

SEQ ID NO: 23705 - RNA, 22 nt, synthetic construct
  source 1..22: mol_type = other RNA
ctgcgtgggtcatagtaattct

SEQ ID NO: 23706 - RNA, 22 nt, synthetic construct
  source 1..22: mol_type = other RNA
ctgctcaggagtcagaagaaaa

SEQ ID NO: 23707 - RNA, 22 nt, synthetic construct
  source 1..22: mol_type = other RNA
ctgctcagtaaaaagagaaaac

SEQ ID NO: 23708 - RNA, 22 nt, synthetic construct
  source 1..22: mol_type = other RNA
ctgctgggtaagagtcaagccc

SEQ ID NO: 23709 - RNA, 22 nt, synthetic construct
  source 1..22: mol_type = other RNA
ctgctttacagagaattggatc

SEQ ID NO: 23710 - RNA, 22 nt, synthetic construct
  source 1..22: mol_type = other RNA
ctgcttttaatcctgcagattc

SEQ ID NO: 23711 - RNA, 22 nt, synthetic construct
  source 1..22: mol_type = other RNA
ctgcttttttaaaagggcagtt

SEQ ID NO: 23712 - RNA, 22 nt, synthetic construct
  source 1..22: mol_type = other RNA
ctggaaacacttgattggagga

SEQ ID NO: 23713 - RNA, 22 nt, synthetic construct
  source 1..22: mol_type = other RNA
ctggactgtgaagacggtcagg

SEQ ID NO: 23714 - RNA, 22 nt, synthetic construct
  source 1..22: mol_type = other RNA
ctggatagactttcctcaattt

SEQ ID NO: 23715 - RNA, 22 nt, synthetic construct
  source 1..22: mol_type = other RNA
ctggcccattacatttcattta

SEQ ID NO: 23716 - RNA, 22 nt, synthetic construct
  source 1..22: mol_type = other RNA
ctggcttgtactgtttacagca

SEQ ID NO: 23717 - RNA, 22 nt, synthetic construct
  source 1..22: mol_type = other RNA
ctgggattctgtccctgaccgt

SEQ ID NO: 23718 - RNA, 22 nt, synthetic construct
  source 1..22: mol_type = other RNA
ctgggccacactgcaagaactg

SEQ ID NO: 23719 - RNA, 22 nt, synthetic construct
  source 1..22: mol_type = other RNA
ctggggagagagggtgagggag

SEQ ID NO: 23720 - RNA, 22 nt, synthetic construct
  source 1..22: mol_type = other RNA
ctggggcttgactcttacccag

SEQ ID NO: 23721 - RNA, 22 nt, synthetic construct
  source 1..22: mol_type = other RNA
ctggggttgttgtcattgctga

SEQ ID NO: 23722 - RNA, 22 nt, synthetic construct
  source 1..22: mol_type = other RNA
ctgggtaagagtcaagccccag

SEQ ID NO: 23723 - RNA, 22 nt, synthetic construct
  source 1..22: mol_type = other RNA
ctgggtcccatgcggcccgcgg

SEQ ID NO: 23724 - RNA, 22 nt, synthetic construct
  source 1..22: mol_type = other RNA
ctgggttcatttgtatcacaca

SEQ ID NO: 23725 - RNA, 22 nt, synthetic construct
  source 1..22: mol_type = other RNA
ctggtaagaacagaaatgagag

SEQ ID NO: 23726 - RNA, 22 nt, synthetic construct
  source 1..22: mol_type = other RNA
ctggtagggatgcaaaggggta

SEQ ID NO: 23727 - RNA, 22 nt, synthetic construct
  source 1..22: mol_type = other RNA
ctggtatgactaaagaactgaa

SEQ ID NO: 23728 - RNA, 22 nt, synthetic construct
  source 1..22: mol_type = other RNA
ctggtgtctcgcgaaaccagac

SEQ ID NO: 23729 - RNA, 22 nt, synthetic construct
  source 1..22: mol_type = other RNA
ctggtttacaggatgaattctg

SEQ ID NO: 23730 - RNA, 22 nt, synthetic construct
  source 1..22: mol_type = other RNA
ctggtttcgcgagacaccaggc

SEQ ID NO: 23731 - RNA, 22 nt, synthetic construct
  source 1..22: mol_type = other RNA
ctggtttctcaagcaaaagcta

SEQ ID NO: 23732 - RNA, 22 nt, synthetic construct
  source 1..22: mol_type = other RNA
ctgtaaacagtacaagccagta

SEQ ID NO: 23733 - RNA, 22 nt, synthetic construct
  source 1..22: mol_type = other RNA
ctgtaaaccaggggtgtccaat

SEQ ID NO: 23734 - RNA, 22 nt, synthetic construct
  source 1..22: mol_type = other RNA
ctgtaaagcagtagtcaagatc

SEQ ID NO: 23735 - RNA, 22 nt, synthetic construct
  source 1..22: mol_type = other RNA
ctgtaacagtttaatggaatct

SEQ ID NO: 23736 - RNA, 22 nt, synthetic construct
  source 1..22: mol_type = other RNA
ctgtaatccacagaacaagtcc

SEQ ID NO: 23737 - RNA, 22 nt, synthetic construct
  source 1..22: mol_type = other RNA
ctgtagccccggacttgttctg

SEQ ID NO: 23738 - RNA, 22 nt, synthetic construct
  source 1..22: mol_type = other RNA
ctgtattagcaatataaaaagc

SEQ ID NO: 23739 - RNA, 22 nt, synthetic construct
  source 1..22: mol_type = other RNA
ctgtcattttcatgctctatct

SEQ ID NO: 23740 - RNA, 22 nt, synthetic construct
  source 1..22: mol_type = other RNA
ctgtccacagttgcaattcaaa

SEQ ID NO: 23741 - RNA, 22 nt, synthetic construct
  source 1..22: mol_type = other RNA
ctgtccctgaccgtcttcacag

SEQ ID NO: 23742 - RNA, 22 nt, synthetic construct
  source 1..22: mol_type = other RNA
ctgtcctacaagttttcacttc

SEQ ID NO: 23743 - RNA, 22 nt, synthetic construct
  source 1..22: mol_type = other RNA
ctgtcctgggtcccatgcggcc

SEQ ID NO: 23744 - RNA, 22 nt, synthetic construct
  source 1..22: mol_type = other RNA
ctgtcctttatatgtggcccaa

SEQ ID NO: 23745 - RNA, 22 nt, synthetic construct
  source 1..22: mol_type = other RNA
ctgtctctagaaaaatgctcca

SEQ ID NO: 23746 - RNA, 22 nt, synthetic construct
  source 1..22: mol_type = other RNA
ctgtctctgtctttagtgttat

SEQ ID NO: 23747 - RNA, 22 nt, synthetic construct
  source 1..22: mol_type = other RNA
ctgtctggtttcgcgagacacc

SEQ ID NO: 23748 - RNA, 22 nt, synthetic construct
  source 1..22: mol_type = other RNA
ctgtcttgggccacatataaag

SEQ ID NO: 23749 - RNA, 22 nt, synthetic construct
  source 1..22: mol_type = other RNA
ctgtctttagtgttatcttttg

SEQ ID NO: 23750 - RNA, 22 nt, synthetic construct
  source 1..22: mol_type = other RNA
ctgtgaagacggtcagggacag

SEQ ID NO: 23751 - RNA, 22 nt, synthetic construct
  source 1..22: mol_type = other RNA
ctgtggacagtatagctgtagc

SEQ ID NO: 23752 - RNA, 22 nt, synthetic construct
  source 1..22: mol_type = other RNA
ctgtggattacagaatacgtgg

SEQ ID NO: 23753 - RNA, 22 nt, synthetic construct
  source 1..22: mol_type = other RNA
ctgtgtgatacaaatgaaccca

SEQ ID NO: 23754 - RNA, 22 nt, synthetic construct
  source 1..22: mol_type = other RNA
ctgtgtgatagcttccaaattg

SEQ ID NO: 23755 - RNA, 22 nt, synthetic construct
  source 1..22: mol_type = other RNA
ctgttaaattgaggaaagtcta

SEQ ID NO: 23756 - RNA, 22 nt, synthetic construct
  source 1..22: mol_type = other RNA
ctgttacaggagctacatagtt

SEQ ID NO: 23757 - RNA, 22 nt, synthetic construct
  source 1..22: mol_type = other RNA
ctgttctcgtgaatgtgatgca

SEQ ID NO: 23758 - RNA, 22 nt, synthetic construct
  source 1..22: mol_type = other RNA
ctgttcttaccagttagtaact

SEQ ID NO: 23759 - RNA, 22 nt, synthetic construct
  source 1..22: mol_type = other RNA
ctgttgtccaaggcaggcacat

SEQ ID NO: 23760 - RNA, 22 nt, synthetic construct
  source 1..22: mol_type = other RNA
ctgttgttctatgacccaaact

SEQ ID NO: 23761 - RNA, 22 nt, synthetic construct
  source 1..22: mol_type = other RNA
ctgtttacagcaagttgtctaa

SEQ ID NO: 23762 - RNA, 22 nt, synthetic construct
  source 1..22: mol_type = other RNA
cttaaagttggctagacatcag

SEQ ID NO: 23763 - RNA, 22 nt, synthetic construct
  source 1..22: mol_type = other RNA
cttaactattctgagctttttg

SEQ ID NO: 23764 - RNA, 22 nt, synthetic construct
  source 1..22: mol_type = other RNA
cttaatttgtggtggaaccaat

SEQ ID NO: 23765 - RNA, 22 nt, synthetic construct
  source 1..22: mol_type = other RNA
cttacatcttgttaggatgatt

SEQ ID NO: 23766 - RNA, 22 nt, synthetic construct
  source 1..22: mol_type = other RNA
cttaccagttagtaactgatct

SEQ ID NO: 23767 - RNA, 22 nt, synthetic construct
  source 1..22: mol_type = other RNA
cttacccagcagtgcttttatt

SEQ ID NO: 23768 - RNA, 22 nt, synthetic construct
  source 1..22: mol_type = other RNA
cttactgctcagtaaaaagaga

SEQ ID NO: 23769 - RNA, 22 nt, synthetic construct
  source 1..22: mol_type = other RNA
cttactttgtgattgttttcta

SEQ ID NO: 23770 - RNA, 22 nt, synthetic construct
  source 1..22: mol_type = other RNA
cttagagctcctccaatcaagt

SEQ ID NO: 23771 - RNA, 22 nt, synthetic construct
  source 1..22: mol_type = other RNA
cttagcaactctcactcatact

SEQ ID NO: 23772 - RNA, 22 nt, synthetic construct
  source 1..22: mol_type = other RNA
cttagctgggattctgtccctg

SEQ ID NO: 23773 - RNA, 22 nt, synthetic construct
  source 1..22: mol_type = other RNA
cttatcatttttggagcatttt

SEQ ID NO: 23774 - RNA, 22 nt, synthetic construct
  source 1..22: mol_type = other RNA
cttatgcatcacattcacgaga

SEQ ID NO: 23775 - RNA, 22 nt, synthetic construct
  source 1..22: mol_type = other RNA
cttcaaaaagctcagaatagtt

SEQ ID NO: 23776 - RNA, 22 nt, synthetic construct
  source 1..22: mol_type = other RNA
cttcacagtccaggtgatcttg

SEQ ID NO: 23777 - RNA, 22 nt, synthetic construct
  source 1..22: mol_type = other RNA
cttcagcttttatttccttact

SEQ ID NO: 23778 - RNA, 22 nt, synthetic construct
  source 1..22: mol_type = other RNA
cttcaggagagaggtcatattt

SEQ ID NO: 23779 - RNA, 22 nt, synthetic construct
  source 1..22: mol_type = other RNA
cttccaaattgctgtctctgtc

SEQ ID NO: 23780 - RNA, 22 nt, synthetic construct
  source 1..22: mol_type = other RNA
cttccatggtctgttgttctat

SEQ ID NO: 23781 - RNA, 22 nt, synthetic construct
  source 1..22: mol_type = other RNA
cttccctccctcaccctctctc

SEQ ID NO: 23782 - RNA, 22 nt, synthetic construct
  source 1..22: mol_type = other RNA
cttccctgggccacactgcaag

SEQ ID NO: 23783 - RNA, 22 nt, synthetic construct
  source 1..22: mol_type = other RNA
cttcctctaaatacctctcatt

SEQ ID NO: 23784 - RNA, 22 nt, synthetic construct
  source 1..22: mol_type = other RNA
cttcctggaaacacttgattgg

SEQ ID NO: 23785 - RNA, 22 nt, synthetic construct
  source 1..22: mol_type = other RNA
cttcctttaggacaatcatcct

SEQ ID NO: 23786 - RNA, 22 nt, synthetic construct
  source 1..22: mol_type = other RNA
cttctgactcctgagcagtttg

SEQ ID NO: 23787 - RNA, 22 nt, synthetic construct
  source 1..22: mol_type = other RNA
cttgaatgaagaataggtctgt

SEQ ID NO: 23788 - RNA, 22 nt, synthetic construct
  source 1..22: mol_type = other RNA
cttgactactgctttacagaga

SEQ ID NO: 23789 - RNA, 22 nt, synthetic construct
  source 1..22: mol_type = other RNA
cttgactcttacccagcagtgc

SEQ ID NO: 23790 - RNA, 22 nt, synthetic construct
  source 1..22: mol_type = other RNA
cttgagaaaccagtgcttccct

SEQ ID NO: 23791 - RNA, 22 nt, synthetic construct
  source 1..22: mol_type = other RNA
cttgagcattggaaaagtggct

SEQ ID NO: 23792 - RNA, 22 nt, synthetic construct
  source 1..22: mol_type = other RNA
cttgagctggggcttgactctt

SEQ ID NO: 23793 - RNA, 22 nt, synthetic construct
  source 1..22: mol_type = other RNA
cttgagttatagaaaacaatca

SEQ ID NO: 23794 - RNA, 22 nt, synthetic construct
  source 1..22: mol_type = other RNA
cttgatcccattttccatttgt

SEQ ID NO: 23795 - RNA, 22 nt, synthetic construct
  source 1..22: mol_type = other RNA
cttgatcttgggtagcctggtg

SEQ ID NO: 23796 - RNA, 22 nt, synthetic construct
  source 1..22: mol_type = other RNA
cttgattggaggagctctaagc

SEQ ID NO: 23797 - RNA, 22 nt, synthetic construct
  source 1..22: mol_type = other RNA
cttgattttcattttatccttt

SEQ ID NO: 23798 - RNA, 22 nt, synthetic construct
  source 1..22: mol_type = other RNA
cttgcagtgtggcccagggaag

SEQ ID NO: 23799 - RNA, 22 nt, synthetic construct
  source 1..22: mol_type = other RNA
cttgctcctctagtattcagac

SEQ ID NO: 23800 - RNA, 22 nt, synthetic construct
  source 1..22: mol_type = other RNA
cttgctgcaccaccaaagtgta

SEQ ID NO: 23801 - RNA, 22 nt, synthetic construct
  source 1..22: mol_type = other RNA
cttgctgcttttaatcctgcag

SEQ ID NO: 23802 - RNA, 22 nt, synthetic construct
  source 1..22: mol_type = other RNA
cttgctgtaaacagtacaagcc

SEQ ID NO: 23803 - RNA, 22 nt, synthetic construct
  source 1..22: mol_type = other RNA
cttgctttcactgttgtccaag

SEQ ID NO: 23804 - RNA, 22 nt, synthetic construct
  source 1..22: mol_type = other RNA
cttggacaacagtgaaagcaag

SEQ ID NO: 23805 - RNA, 22 nt, synthetic construct
  source 1..22: mol_type = other RNA
cttgggccacatataaaggaca

SEQ ID NO: 23806 - RNA, 22 nt, synthetic construct
  source 1..22: mol_type = other RNA
cttgggtagcctggtgtctcgc

SEQ ID NO: 23807 - RNA, 22 nt, synthetic construct
  source 1..22: mol_type = other RNA
cttgtactcctgagctcctagt

SEQ ID NO: 23808 - RNA, 22 nt, synthetic construct
  source 1..22: mol_type = other RNA
cttgtactgtttacagcaagtt

SEQ ID NO: 23809 - RNA, 22 nt, synthetic construct
  source 1..22: mol_type = other RNA
cttgtaggacagaaatttaggc

SEQ ID NO: 23810 - RNA, 22 nt, synthetic construct
  source 1..22: mol_type = other RNA
cttgttaggatgattgtcctaa

SEQ ID NO: 23811 - RNA, 22 nt, synthetic construct
  source 1..22: mol_type = other RNA
cttgttctgtggattacagaat

SEQ ID NO: 23812 - RNA, 22 nt, synthetic construct
  source 1..22: mol_type = other RNA
ctttaaaaatggtttgttggac

SEQ ID NO: 23813 - RNA, 22 nt, synthetic construct
  source 1..22: mol_type = other RNA
ctttaagtaaatggagtgagcg

SEQ ID NO: 23814 - RNA, 22 nt, synthetic construct
  source 1..22: mol_type = other RNA
ctttacagagaattggatctga

SEQ ID NO: 23815 - RNA, 22 nt, synthetic construct
  source 1..22: mol_type = other RNA
ctttaggacaatcatcctaaca

SEQ ID NO: 23816 - RNA, 22 nt, synthetic construct
  source 1..22: mol_type = other RNA
ctttagtcataccagccacttt

SEQ ID NO: 23817 - RNA, 22 nt, synthetic construct
  source 1..22: mol_type = other RNA
ctttagtgttatcttttgatcc

SEQ ID NO: 23818 - RNA, 22 nt, synthetic construct
  source 1..22: mol_type = other RNA
ctttatatgtggcccaagacag

SEQ ID NO: 23819 - RNA, 22 nt, synthetic construct
  source 1..22: mol_type = other RNA
ctttatgtctgtctctagaaaa

SEQ ID NO: 23820 - RNA, 22 nt, synthetic construct
  source 1..22: mol_type = other RNA
ctttcactgttgtccaaggcag

SEQ ID NO: 23821 - RNA, 22 nt, synthetic construct
  source 1..22: mol_type = other RNA
ctttcctcaatttaacagcttt

SEQ ID NO: 23822 - RNA, 22 nt, synthetic construct
  source 1..22: mol_type = other RNA
ctttcggcttccctgggccaca

SEQ ID NO: 23823 - RNA, 22 nt, synthetic construct
  source 1..22: mol_type = other RNA
ctttctccctctcttgatcttg

SEQ ID NO: 23824 - RNA, 22 nt, synthetic construct
  source 1..22: mol_type = other RNA
ctttgcatccctaccaggcatc

SEQ ID NO: 23825 - RNA, 22 nt, synthetic construct
  source 1..22: mol_type = other RNA
ctttggtcatgccttccatggt

SEQ ID NO: 23826 - RNA, 22 nt, synthetic construct
  source 1..22: mol_type = other RNA
ctttggtggtgcagcaagggtc

SEQ ID NO: 23827 - RNA, 22 nt, synthetic construct
  source 1..22: mol_type = other RNA
ctttgtgattgttttctataac

SEQ ID NO: 23828 - RNA, 22 nt, synthetic construct
  source 1..22: mol_type = other RNA
ctttgtggggtggttctttttg

SEQ ID NO: 23829 - RNA, 22 nt, synthetic construct
  source 1..22: mol_type = other RNA
cttttaaaaaagcagttttctt

SEQ ID NO: 23830 - RNA, 22 nt, synthetic construct
  source 1..22: mol_type = other RNA
cttttaatcctgcagattcaaa

SEQ ID NO: 23831 - RNA, 22 nt, synthetic construct
  source 1..22: mol_type = other RNA
cttttattcctccctagttcac

SEQ ID NO: 23832 - RNA, 22 nt, synthetic construct
  source 1..22: mol_type = other RNA
cttttatttccttactgctcag

SEQ ID NO: 23833 - RNA, 22 nt, synthetic construct
  source 1..22: mol_type = other RNA
cttttccaatgctcaagattaa

SEQ ID NO: 23834 - RNA, 22 nt, synthetic construct
  source 1..22: mol_type = other RNA
cttttgatccatcttacatctt

SEQ ID NO: 23835 - RNA, 22 nt, synthetic construct
  source 1..22: mol_type = other RNA
cttttgcttgagaaaccagtgc

SEQ ID NO: 23836 - RNA, 22 nt, synthetic construct
  source 1..22: mol_type = other RNA
ctttttactgagcagtaaggaa

SEQ ID NO: 23837 - RNA, 22 nt, synthetic construct
  source 1..22: mol_type = other RNA
ctttttcatttttcactatttt

SEQ ID NO: 23838 - RNA, 22 nt, synthetic construct
  source 1..22: mol_type = other RNA
ctttttccttagctgggattct

SEQ ID NO: 23839 - RNA, 22 nt, synthetic construct
  source 1..22: mol_type = other RNA
ctttttcttcctctaaatacct

SEQ ID NO: 23840 - RNA, 22 nt, synthetic construct
  source 1..22: mol_type = other RNA
ctttttgaaggaatagtgtctt

SEQ ID NO: 23841 - RNA, 22 nt, synthetic construct
  source 1..22: mol_type = other RNA
ctttttggaatgctacccttgc

SEQ ID NO: 23842 - RNA, 22 nt, synthetic construct
  source 1..22: mol_type = other RNA
cttttttaaaagggcagtttgg

SEQ ID NO: 23843 - RNA, 22 nt, synthetic construct
  source 1..22: mol_type = other RNA
gaaaaagctgttaaattgagga

SEQ ID NO: 23844 - RNA, 22 nt, synthetic construct
  source 1..22: mol_type = other RNA
gaaaaagggagatgttgcctaa

SEQ ID NO: 23845 - RNA, 22 nt, synthetic construct
  source 1..22: mol_type = other RNA
gaaaaatgaaaaagctgttaaa

SEQ ID NO: 23846 - RNA, 22 nt, synthetic construct
  source 1..22: mol_type = other RNA
gaaaaatgctccaaaaatgata

SEQ ID NO: 23847 - RNA, 22 nt, synthetic construct
  source 1..22: mol_type = other RNA
gaaaaattttagcttttgcttg

SEQ ID NO: 23848 - RNA, 22 nt, synthetic construct
  source 1..22: mol_type = other RNA
gaaaacaatcacaaagtaagtt

SEQ ID NO: 23849 - RNA, 22 nt, synthetic construct
  source 1..22: mol_type = other RNA
gaaaaccatcaatgtccacgta

SEQ ID NO: 23850 - RNA, 22 nt, synthetic construct
  source 1..22: mol_type = other RNA
gaaaactgcttttttaaaaggg

SEQ ID NO: 23851 - RNA, 22 nt, synthetic construct
  source 1..22: mol_type = other RNA
gaaaacttgtaggacagaaatt

SEQ ID NO: 23852 - RNA, 22 nt, synthetic construct
  source 1..22: mol_type = other RNA
gaaaagtggctggtatgactaa

SEQ ID NO: 23853 - RNA, 22 nt, synthetic construct
  source 1..22: mol_type = other RNA
gaaaatcaagataaacatttaa

SEQ ID NO: 23854 - RNA, 22 nt, synthetic construct
  source 1..22: mol_type = other RNA
gaaaatgacaggtgaaactcca

SEQ ID NO: 23855 - RNA, 22 nt, synthetic construct
  source 1..22: mol_type = other RNA
gaaaatgggatcaagtatgagt

SEQ ID NO: 23856 - RNA, 22 nt, synthetic construct
  source 1..22: mol_type = other RNA
gaaacacttgattggaggagct

SEQ ID NO: 23857 - RNA, 22 nt, synthetic construct
  source 1..22: mol_type = other RNA
gaaaccagacagattggttcca

SEQ ID NO: 23858 - RNA, 22 nt, synthetic construct
  source 1..22: mol_type = other RNA
gaaaccagtgcttccctccctc

SEQ ID NO: 23859 - RNA, 22 nt, synthetic construct
  source 1..22: mol_type = other RNA
gaaactccattactggcttgta

SEQ ID NO: 23860 - RNA, 22 nt, synthetic construct
  source 1..22: mol_type = other RNA
gaaagattggacacccctggtt

SEQ ID NO: 23861 - RNA, 22 nt, synthetic construct
  source 1..22: mol_type = other RNA
gaaagcaagcgttaatgagttt

SEQ ID NO: 23862 - RNA, 22 nt, synthetic construct
  source 1..22: mol_type = other RNA
gaaagctaagtccaacaaacca

SEQ ID NO: 23863 - RNA, 22 nt, synthetic construct
  source 1..22: mol_type = other RNA
gaaagctagtgctatgtctgaa

SEQ ID NO: 23864 - RNA, 22 nt, synthetic construct
  source 1..22: mol_type = other RNA
gaaagtctatccagggacctta

SEQ ID NO: 23865 - RNA, 22 nt, synthetic construct
  source 1..22: mol_type = other RNA
gaaataaaagctgaagctctct

SEQ ID NO: 23866 - RNA, 22 nt, synthetic construct
  source 1..22: mol_type = other RNA
gaaatccaaactcattaacgct

SEQ ID NO: 23867 - RNA, 22 nt, synthetic construct
  source 1..22: mol_type = other RNA
gaaatgagaggtatttagagga

SEQ ID NO: 23868 - RNA, 22 nt, synthetic construct
  source 1..22: mol_type = other RNA
gaaatgtaatgggccagagagc

SEQ ID NO: 23869 - RNA, 22 nt, synthetic construct
  source 1..22: mol_type = other RNA
gaaatttaggctgggttcattt

SEQ ID NO: 23870 - RNA, 22 nt, synthetic construct
  source 1..22: mol_type = other RNA
gaacaacagaccatggaaggca

SEQ ID NO: 23871 - RNA, 22 nt, synthetic construct
  source 1..22: mol_type = other RNA
gaacaagtccggggctacagct

SEQ ID NO: 23872 - RNA, 22 nt, synthetic construct
  source 1..22: mol_type = other RNA
gaacagaaatgagaggtattta

SEQ ID NO: 23873 - RNA, 22 nt, synthetic construct
  source 1..22: mol_type = other RNA
gaacagaattcatcctgtaaac

SEQ ID NO: 23874 - RNA, 22 nt, synthetic construct
  source 1..22: mol_type = other RNA
gaaccaatctgtctggtttcgc

SEQ ID NO: 23875 - RNA, 22 nt, synthetic construct
  source 1..22: mol_type = other RNA
gaaccaccccacaaagatatat

SEQ ID NO: 23876 - RNA, 22 nt, synthetic construct
  source 1..22: mol_type = other RNA
gaacccagcctaaatttctgtc

SEQ ID NO: 23877 - RNA, 22 nt, synthetic construct
  source 1..22: mol_type = other RNA
gaacgtgaactagggaggaata

SEQ ID NO: 23878 - RNA, 22 nt, synthetic construct
  source 1..22: mol_type = other RNA
gaactagggaggaataaaagca

SEQ ID NO: 23879 - RNA, 22 nt, synthetic construct
  source 1..22: mol_type = other RNA
gaactgtcttgggccacatata

SEQ ID NO: 23880 - RNA, 22 nt, synthetic construct
  source 1..22: mol_type = other RNA
gaacttgaatgaagaataggtc

SEQ ID NO: 23881 - RNA, 22 nt, synthetic construct
  source 1..22: mol_type = other RNA
gaagaaaaagggagatgttgcc

SEQ ID NO: 23882 - RNA, 22 nt, synthetic construct
  source 1..22: mol_type = other RNA
gaagaaaactgcttttttaaaa

SEQ ID NO: 23883 - RNA, 22 nt, synthetic construct
  source 1..22: mol_type = other RNA
gaagaataggtctgtgtgatac

SEQ ID NO: 23884 - RNA, 22 nt, synthetic construct
  source 1..22: mol_type = other RNA
gaagacggtcagggacagaatc

SEQ ID NO: 23885 - RNA, 22 nt, synthetic construct
  source 1..22: mol_type = other RNA
gaagatagagcatgaaaatgac

SEQ ID NO: 23886 - RNA, 22 nt, synthetic construct
  source 1..22: mol_type = other RNA
gaagcactggtttctcaagcaa

SEQ ID NO: 23887 - RNA, 22 nt, synthetic construct
  source 1..22: mol_type = other RNA
gaagccgaaagattggacaccc

SEQ ID NO: 23888 - RNA, 22 nt, synthetic construct
  source 1..22: mol_type = other RNA
gaagctatcacacaggcatctg

SEQ ID NO: 23889 - RNA, 22 nt, synthetic construct
  source 1..22: mol_type = other RNA
gaagctctctggcccattacat

SEQ ID NO: 23890 - RNA, 22 nt, synthetic construct
  source 1..22: mol_type = other RNA
gaaggaatagtgtcttgtactc

SEQ ID NO: 23891 - RNA, 22 nt, synthetic construct
  source 1..22: mol_type = other RNA
gaaggcatgaccaaaggggaga

SEQ ID NO: 23892 - RNA, 22 nt, synthetic construct
  source 1..22: mol_type = other RNA
gaagtcacatggaatgaattgc

SEQ ID NO: 23893 - RNA, 22 nt, synthetic construct
  source 1..22: mol_type = other RNA
gaagtgaaaacttgtaggacag

SEQ ID NO: 23894 - RNA, 22 nt, synthetic construct
  source 1..22: mol_type = other RNA
gaataaaagcactgctgggtaa

SEQ ID NO: 23895 - RNA, 22 nt, synthetic construct
  source 1..22: mol_type = other RNA
gaatacgtggacattgatggtt

SEQ ID NO: 23896 - RNA, 22 nt, synthetic construct
  source 1..22: mol_type = other RNA
gaatactagaggagcaagtaca

SEQ ID NO: 23897 - RNA, 22 nt, synthetic construct
  source 1..22: mol_type = other RNA
gaataggtctgtgtgatacaaa

SEQ ID NO: 23898 - RNA, 22 nt, synthetic construct
  source 1..22: mol_type = other RNA
gaatagtgtcttgtactcctga

SEQ ID NO: 23899 - RNA, 22 nt, synthetic construct
  source 1..22: mol_type = other RNA
gaatagttaaggtaatttaaat

SEQ ID NO: 23900 - RNA, 22 nt, synthetic construct
  source 1..22: mol_type = other RNA
gaatcccagctaaggaaaaagg

SEQ ID NO: 23901 - RNA, 22 nt, synthetic construct
  source 1..22: mol_type = other RNA
gaatctcacctccctaaaattc

SEQ ID NO: 23902 - RNA, 22 nt, synthetic construct
  source 1..22: mol_type = other RNA
gaatctgcaggattaaaagcag

SEQ ID NO: 23903 - RNA, 22 nt, synthetic construct
  source 1..22: mol_type = other RNA
gaatgaagaataggtctgtgtg

SEQ ID NO: 23904 - RNA, 22 nt, synthetic construct
  source 1..22: mol_type = other RNA
gaatgaattgcagttacccaaa

SEQ ID NO: 23905 - RNA, 22 nt, synthetic construct
  source 1..22: mol_type = other RNA
gaatgctacccttgctgctttt

SEQ ID NO: 23906 - RNA, 22 nt, synthetic construct
  source 1..22: mol_type = other RNA
gaatgtgatgcataaggtccct

SEQ ID NO: 23907 - RNA, 22 nt, synthetic construct
  source 1..22: mol_type = other RNA
gaattactatgacccacgcagt

SEQ ID NO: 23908 - RNA, 22 nt, synthetic construct
  source 1..22: mol_type = other RNA
gaattcatcctgtaaaccaggg

SEQ ID NO: 23909 - RNA, 22 nt, synthetic construct
  source 1..22: mol_type = other RNA
gaattctgttctcgtgaatgtg

SEQ ID NO: 23910 - RNA, 22 nt, synthetic construct
  source 1..22: mol_type = other RNA
gaattgcaactgtggacagtat

SEQ ID NO: 23911 - RNA, 22 nt, synthetic construct
  source 1..22: mol_type = other RNA
gaattgcagttacccaaatcat

SEQ ID NO: 23912 - RNA, 22 nt, synthetic construct
  source 1..22: mol_type = other RNA
gaattggatctgaggttaggca

SEQ ID NO: 23913 - RNA, 22 nt, synthetic construct
  source 1..22: mol_type = other RNA
gaatttgtgttgggtcgcattc

SEQ ID NO: 23914 - RNA, 22 nt, synthetic construct
  source 1..22: mol_type = other RNA
gaattttagggaggtgagattc

SEQ ID NO: 23915 - RNA, 22 nt, synthetic construct
  source 1..22: mol_type = other RNA
gacaacaaccccagaattacta

SEQ ID NO: 23916 - RNA, 22 nt, synthetic construct
  source 1..22: mol_type = other RNA
gacaacagtgaaagcaagcgtt

SEQ ID NO: 23917 - RNA, 22 nt, synthetic construct
  source 1..22: mol_type = other RNA
gacaacttgctgtaaacagtac

SEQ ID NO: 23918 - RNA, 22 nt, synthetic construct
  source 1..22: mol_type = other RNA
gacaatcatcctaacaagatgt

SEQ ID NO: 23919 - RNA, 22 nt, synthetic construct
  source 1..22: mol_type = other RNA
gacaccaggctacccaagatca

SEQ ID NO: 23920 - RNA, 22 nt, synthetic construct
  source 1..22: mol_type = other RNA
gacacccctggtttacaggatg

SEQ ID NO: 23921 - RNA, 22 nt, synthetic construct
  source 1..22: mol_type = other RNA
gacactattccttcaaaaagct

SEQ ID NO: 23922 - RNA, 22 nt, synthetic construct
  source 1..22: mol_type = other RNA
gacagaaatttaggctgggttc

SEQ ID NO: 23923 - RNA, 22 nt, synthetic construct
  source 1..22: mol_type = other RNA
gacagaatcccagctaaggaaa

SEQ ID NO: 23924 - RNA, 22 nt, synthetic construct
  source 1..22: mol_type = other RNA
gacagacataaagcatgatcac

SEQ ID NO: 23925 - RNA, 22 nt, synthetic construct
  source 1..22: mol_type = other RNA
gacagagacagcaatttggaag

SEQ ID NO: 23926 - RNA, 22 nt, synthetic construct
  source 1..22: mol_type = other RNA
gacagattggttccaccacaaa

SEQ ID NO: 23927 - RNA, 22 nt, synthetic construct
  source 1..22: mol_type = other RNA
gacagcaatttggaagctatca

SEQ ID NO: 23928 - RNA, 22 nt, synthetic construct
  source 1..22: mol_type = other RNA
gacaggtgaaactccattactg

SEQ ID NO: 23929 - RNA, 22 nt, synthetic construct
  source 1..22: mol_type = other RNA
gacagtatagctgtagccccgg

SEQ ID NO: 23930 - RNA, 22 nt, synthetic construct
  source 1..22: mol_type = other RNA
gacagttcttgcagtgtggccc

SEQ ID NO: 23931 - RNA, 22 nt, synthetic construct
  source 1..22: mol_type = other RNA
gacataaagcatgatcacctga

SEQ ID NO: 23932 - RNA, 22 nt, synthetic construct
  source 1..22: mol_type = other RNA
gacatagcactagctttctccc

SEQ ID NO: 23933 - RNA, 22 nt, synthetic construct
  source 1..22: mol_type = other RNA
gacatcagagtatactaggagc

SEQ ID NO: 23934 - RNA, 22 nt, synthetic construct
  source 1..22: mol_type = other RNA
gacatgtaaatgtctttatggt

SEQ ID NO: 23935 - RNA, 22 nt, synthetic construct
  source 1..22: mol_type = other RNA
gacattgatggttttctctttt

SEQ ID NO: 23936 - RNA, 22 nt, synthetic construct
  source 1..22: mol_type = other RNA
gacatttacatgtcgctcactc

SEQ ID NO: 23937 - RNA, 22 nt, synthetic construct
  source 1..22: mol_type = other RNA
gacatttgaatctgcaggatta

SEQ ID NO: 23938 - RNA, 22 nt, synthetic construct
  source 1..22: mol_type = other RNA
gacattttattaatcttgagca

SEQ ID NO: 23939 - RNA, 22 nt, synthetic construct
  source 1..22: mol_type = other RNA
gaccaaaggggagatgacattt

SEQ ID NO: 23940 - RNA, 22 nt, synthetic construct
  source 1..22: mol_type = other RNA
gaccatggaaggcatgaccaaa

SEQ ID NO: 23941 - RNA, 22 nt, synthetic construct
  source 1..22: mol_type = other RNA
gacccaaactgcccttttaaaa

SEQ ID NO: 23942 - RNA, 22 nt, synthetic construct
  source 1..22: mol_type = other RNA
gacccacgcagtacaaactgct

SEQ ID NO: 23943 - RNA, 22 nt, synthetic construct
  source 1..22: mol_type = other RNA
gacccaggacagctttgaatgc

SEQ ID NO: 23944 - RNA, 22 nt, synthetic construct
  source 1..22: mol_type = other RNA
gacccttgctgcaccaccaaag

SEQ ID NO: 23945 - RNA, 22 nt, synthetic construct
  source 1..22: mol_type = other RNA
gaccgtcttcacagtccaggtg

SEQ ID NO: 23946 - RNA, 22 nt, synthetic construct
  source 1..22: mol_type = other RNA
gacctattcttcattcaagttc

SEQ ID NO: 23947 - RNA, 22 nt, synthetic construct
  source 1..22: mol_type = other RNA
gacctctctcctgaagtcacat

SEQ ID NO: 23948 - RNA, 22 nt, synthetic construct
  source 1..22: mol_type = other RNA
gaccttatgcatcacattcacg

SEQ ID NO: 23949 - RNA, 22 nt, synthetic construct
  source 1..22: mol_type = other RNA
gacggtcagggacagaatccca

SEQ ID NO: 23950 - RNA, 22 nt, synthetic construct
  source 1..22: mol_type = other RNA
gacgtcatatatctttgtgggg

SEQ ID NO: 23951 - RNA, 22 nt, synthetic construct
  source 1..22: mol_type = other RNA
gacgtctctatgatttgggtaa

SEQ ID NO: 23952 - RNA, 22 nt, synthetic construct
  source 1..22: mol_type = other RNA
gactactgctttacagagaatt

SEQ ID NO: 23953 - RNA, 22 nt, synthetic construct
  source 1..22: mol_type = other RNA
gactcctgagcagtttgtactg

SEQ ID NO: 23954 - RNA, 22 nt, synthetic construct
  source 1..22: mol_type = other RNA
gactcttacccagcagtgcttt

SEQ ID NO: 23955 - RNA, 22 nt, synthetic construct
  source 1..22: mol_type = other RNA
gactgcggattatcactactta

SEQ ID NO: 23956 - RNA, 22 nt, synthetic construct
  source 1..22: mol_type = other RNA
gactgtgaagacggtcagggac

SEQ ID NO: 23957 - RNA, 22 nt, synthetic construct
  source 1..22: mol_type = other RNA
gacttcaggagagaggtcatat

SEQ ID NO: 23958 - RNA, 22 nt, synthetic construct
  source 1..22: mol_type = other RNA
gacttgttctgtggattacaga

SEQ ID NO: 23959 - RNA, 22 nt, synthetic construct
  source 1..22: mol_type = other RNA
gactttcctcaatttaacagct

SEQ ID NO: 23960 - RNA, 22 nt, synthetic construct
  source 1..22: mol_type = other RNA
gagaaaaccatcaatgtccacg

SEQ ID NO: 23961 - RNA, 22 nt, synthetic construct
  source 1..22: mol_type = other RNA
gagaaaccagtgcttccctccc

SEQ ID NO: 23962 - RNA, 22 nt, synthetic construct
  source 1..22: mol_type = other RNA
gagaaagctagtgctatgtctg

SEQ ID NO: 23963 - RNA, 22 nt, synthetic construct
  source 1..22: mol_type = other RNA
gagaacagaattcatcctgtaa

SEQ ID NO: 23964 - RNA, 22 nt, synthetic construct
  source 1..22: mol_type = other RNA
gagaattggatctgaggttagg

SEQ ID NO: 23965 - RNA, 22 nt, synthetic construct
  source 1..22: mol_type = other RNA
gagacaccaggctacccaagat

SEQ ID NO: 23966 - RNA, 22 nt, synthetic construct
  source 1..22: mol_type = other RNA
gagacagacataaagcatgatc

SEQ ID NO: 23967 - RNA, 22 nt, synthetic construct
  source 1..22: mol_type = other RNA
gagacagcaatttggaagctat

SEQ ID NO: 23968 - RNA, 22 nt, synthetic construct
  source 1..22: mol_type = other RNA
gagacccttgctgcaccaccaa

SEQ ID NO: 23969 - RNA, 22 nt, synthetic construct
  source 1..22: mol_type = other RNA
gagacgtcatatatctttgtgg

SEQ ID NO: 23970 - RNA, 22 nt, synthetic construct
  source 1..22: mol_type = other RNA
gagactgcggattatcactact

SEQ ID NO: 23971 - RNA, 22 nt, synthetic construct
  source 1..22: mol_type = other RNA
gagagagggtgagggagggaag

SEQ ID NO: 23972 - RNA, 22 nt, synthetic construct
  source 1..22: mol_type = other RNA
gagagaggtcatatttgtgtgt

SEQ ID NO: 23973 - RNA, 22 nt, synthetic construct
  source 1..22: mol_type = other RNA
gagagcctggggagagagggtg

SEQ ID NO: 23974 - RNA, 22 nt, synthetic construct
  source 1..22: mol_type = other RNA
gagagcttcagcttttatttcc

SEQ ID NO: 23975 - RNA, 22 nt, synthetic construct
  source 1..22: mol_type = other RNA
gagagggagaaagctagtgcta

SEQ ID NO: 23976 - RNA, 22 nt, synthetic construct
  source 1..22: mol_type = other RNA
gagagggtgagggagggaagca

SEQ ID NO: 23977 - RNA, 22 nt, synthetic construct
  source 1..22: mol_type = other RNA
gagaggtatttagaggaagaaa

SEQ ID NO: 23978 - RNA, 22 nt, synthetic construct
  source 1..22: mol_type = other RNA
gagaggtcatatttgtgtgtgt

SEQ ID NO: 23979 - RNA, 22 nt, synthetic construct
  source 1..22: mol_type = other RNA
gagagttgctaagatgcctggt

SEQ ID NO: 23980 - RNA, 22 nt, synthetic construct
  source 1..22: mol_type = other RNA
gagatcagttactaactggtaa

SEQ ID NO: 23981 - RNA, 22 nt, synthetic construct
  source 1..22: mol_type = other RNA
gagatgacatttgaatctgcag

SEQ ID NO: 23982 - RNA, 22 nt, synthetic construct
  source 1..22: mol_type = other RNA
gagatgttgcctaacctcagat

SEQ ID NO: 23983 - RNA, 22 nt, synthetic construct
  source 1..22: mol_type = other RNA
gagattccattaaactgttaca

SEQ ID NO: 23984 - RNA, 22 nt, synthetic construct
  source 1..22: mol_type = other RNA
gagcaagtacaacaaatggaaa

SEQ ID NO: 23985 - RNA, 22 nt, synthetic construct
  source 1..22: mol_type = other RNA
gagcagtaaggaaataaaagct

SEQ ID NO: 23986 - RNA, 22 nt, synthetic construct
  source 1..22: mol_type = other RNA
gagcagtttgtactgcgtgggt

SEQ ID NO: 23987 - RNA, 22 nt, synthetic construct
  source 1..22: mol_type = other RNA
gagcatgaaaatgacaggtgaa

SEQ ID NO: 23988 - RNA, 22 nt, synthetic construct
  source 1..22: mol_type = other RNA
gagcattggaaaagtggctggt

SEQ ID NO: 23989 - RNA, 22 nt, synthetic construct
  source 1..22: mol_type = other RNA
gagcatttttctagagacagac

SEQ ID NO: 23990 - RNA, 22 nt, synthetic construct
  source 1..22: mol_type = other RNA
gagcctggggagagagggtgag

SEQ ID NO: 23991 - RNA, 22 nt, synthetic construct
  source 1..22: mol_type = other RNA
gagcgacatgtaaatgtcttta

SEQ ID NO: 23992 - RNA, 22 nt, synthetic construct
  source 1..22: mol_type = other RNA
gagctacatagttaaatatatc

SEQ ID NO: 23993 - RNA, 22 nt, synthetic construct
  source 1..22: mol_type = other RNA
gagctcaggagtacaagacact

SEQ ID NO: 23994 - RNA, 22 nt, synthetic construct
  source 1..22: mol_type = other RNA
gagctcctagtatactctgatg

SEQ ID NO: 23995 - RNA, 22 nt, synthetic construct
  source 1..22: mol_type = other RNA
gagctcctccaatcaagtgttt

SEQ ID NO: 23996 - RNA, 22 nt, synthetic construct
  source 1..22: mol_type = other RNA
gagctctaagcatcatatcttg

SEQ ID NO: 23997 - RNA, 22 nt, synthetic construct
  source 1..22: mol_type = other RNA
gagctggggcttgactcttacc

SEQ ID NO: 23998 - RNA, 22 nt, synthetic construct
  source 1..22: mol_type = other RNA
gagcttcagcttttatttcctt

SEQ ID NO: 23999 - RNA, 22 nt, synthetic construct
  source 1..22: mol_type = other RNA
gagctttttgaaggaatagtgt

SEQ ID NO: 24000 - RNA, 22 nt, synthetic construct
  source 1..22: mol_type = other RNA
gaggaaagtctatccagggacc

SEQ ID NO: 24001 - RNA, 22 nt, synthetic construct
  source 1..22: mol_type = other RNA
gaggaagaaaaagggagatgtt

SEQ ID NO: 24002 - RNA, 22 nt, synthetic construct
  source 1..22: mol_type = other RNA
gaggaataaaagcactgctggg

SEQ ID NO: 24003 - RNA, 22 nt, synthetic construct
  source 1..22: mol_type = other RNA
gaggaattataataccaacatt

SEQ ID NO: 24004 - RNA, 22 nt, synthetic construct
  source 1..22: mol_type = other RNA
gaggagcaagtacaacaaatgg

SEQ ID NO: 24005 - RNA, 22 nt, synthetic construct
  source 1..22: mol_type = other RNA
gaggagctctaagcatcatatc

SEQ ID NO: 24006 - RNA, 22 nt, synthetic construct
  source 1..22: mol_type = other RNA
gagggaagcactggtttctcaa

SEQ ID NO: 24007 - RNA, 22 nt, synthetic construct
  source 1..22: mol_type = other RNA
gagggagaaagctagtgctatg

SEQ ID NO: 24008 - RNA, 22 nt, synthetic construct
  source 1..22: mol_type = other RNA
gagggagggaagcactggtttc

SEQ ID NO: 24009 - RNA, 22 nt, synthetic construct
  source 1..22: mol_type = other RNA
gagggtgagggagggaagcact

SEQ ID NO: 24010 - RNA, 22 nt, synthetic construct
  source 1..22: mol_type = other RNA
gaggtatttagaggaagaaaaa

SEQ ID NO: 24011 - RNA, 22 nt, synthetic construct
  source 1..22: mol_type = other RNA
gaggtcatatttgtgtgtgtag

SEQ ID NO: 24012 - RNA, 22 nt, synthetic construct
  source 1..22: mol_type = other RNA
gaggtgagattccattaaactg

SEQ ID NO: 24013 - RNA, 22 nt, synthetic construct
  source 1..22: mol_type = other RNA
gaggttaggcaacatctccctt

SEQ ID NO: 24014 - RNA, 22 nt, synthetic construct
  source 1..22: mol_type = other RNA
gagtacaagacactattccttc

SEQ ID NO: 24015 - RNA, 22 nt, synthetic construct
  source 1..22: mol_type = other RNA
gagtatactaggagctcaggag

SEQ ID NO: 24016 - RNA, 22 nt, synthetic construct
  source 1..22: mol_type = other RNA
gagtcaagccccagctcaagcc

SEQ ID NO: 24017 - RNA, 22 nt, synthetic construct
  source 1..22: mol_type = other RNA
gagtcagaagaaaactgctttt

SEQ ID NO: 24018 - RNA, 22 nt, synthetic construct
  source 1..22: mol_type = other RNA
gagtgagagttgctaagatgcc

SEQ ID NO: 24019 - RNA, 22 nt, synthetic construct
  source 1..22: mol_type = other RNA
gagtgagcgacatgtaaatgtc

SEQ ID NO: 24020 - RNA, 22 nt, synthetic construct
  source 1..22: mol_type = other RNA
gagttatagaaaacaatcacaa

SEQ ID NO: 24021 - RNA, 22 nt, synthetic construct
  source 1..22: mol_type = other RNA
gagttgctaagatgcctggtag

SEQ ID NO: 24022 - RNA, 22 nt, synthetic construct
  source 1..22: mol_type = other RNA
gagtttcacctgtcattttcat

SEQ ID NO: 24023 - RNA, 22 nt, synthetic construct
  source 1..22: mol_type = other RNA
gagttttataccatttgagacc

SEQ ID NO: 24024 - RNA, 22 nt, synthetic construct
  source 1..22: mol_type = other RNA
gataaacatttaagaacgtgaa

SEQ ID NO: 24025 - RNA, 22 nt, synthetic construct
  source 1..22: mol_type = other RNA
gataacactaaagacagagaca

SEQ ID NO: 24026 - RNA, 22 nt, synthetic construct
  source 1..22: mol_type = other RNA
gataagtagtgataatccgcag

SEQ ID NO: 24027 - RNA, 22 nt, synthetic construct
  source 1..22: mol_type = other RNA
gatacaaatgaacccagcctaa

SEQ ID NO: 24028 - RNA, 22 nt, synthetic construct
  source 1..22: mol_type = other RNA
gatagactttcctcaatttaac

SEQ ID NO: 24029 - RNA, 22 nt, synthetic construct
  source 1..22: mol_type = other RNA
gatagagcatgaaaatgacagg

SEQ ID NO: 24030 - RNA, 22 nt, synthetic construct
  source 1..22: mol_type = other RNA
gatagcttccaaattgctgtct

SEQ ID NO: 24031 - RNA, 22 nt, synthetic construct
  source 1..22: mol_type = other RNA
gatatatgacgtctctatgatt

SEQ ID NO: 24032 - RNA, 22 nt, synthetic construct
  source 1..22: mol_type = other RNA
gatatatttaactatgtagctc

SEQ ID NO: 24033 - RNA, 22 nt, synthetic construct
  source 1..22: mol_type = other RNA
gatatgatgcttagagctcctc

SEQ ID NO: 24034 - RNA, 22 nt, synthetic construct
  source 1..22: mol_type = other RNA
gatcaaaagataacactaaaga

SEQ ID NO: 24035 - RNA, 22 nt, synthetic construct
  source 1..22: mol_type = other RNA
gatcaagagagggagaaagcta

SEQ ID NO: 24036 - RNA, 22 nt, synthetic construct
  source 1..22: mol_type = other RNA
gatcaagtatgagtgagagttg

SEQ ID NO: 24037 - RNA, 22 nt, synthetic construct
  source 1..22: mol_type = other RNA
gatcacctgagttttataccat

SEQ ID NO: 24038 - RNA, 22 nt, synthetic construct
  source 1..22: mol_type = other RNA
gatcacctggactgtgaagacg

SEQ ID NO: 24039 - RNA, 22 nt, synthetic construct
  source 1..22: mol_type = other RNA
gatcagttactaactggtaaga

SEQ ID NO: 24040 - RNA, 22 nt, synthetic construct
  source 1..22: mol_type = other RNA
gatcatgctttatgtctgtctc

SEQ ID NO: 24041 - RNA, 22 nt, synthetic construct
  source 1..22: mol_type = other RNA
gatccaattctctgtaaagcag

SEQ ID NO: 24042 - RNA, 22 nt, synthetic construct
  source 1..22: mol_type = other RNA
gatccatcttacatcttgttag

SEQ ID NO: 24043 - RNA, 22 nt, synthetic construct
  source 1..22: mol_type = other RNA
gatcccattttccatttgttgt

SEQ ID NO: 24044 - RNA, 22 nt, synthetic construct
  source 1..22: mol_type = other RNA
gatctcagatgcctgtgtgata

SEQ ID NO: 24045 - RNA, 22 nt, synthetic construct
  source 1..22: mol_type = other RNA
gatctgaggttaggcaacatct

SEQ ID NO: 24046 - RNA, 22 nt, synthetic construct
  source 1..22: mol_type = other RNA
gatcttgactactgctttacag

SEQ ID NO: 24047 - RNA, 22 nt, synthetic construct
  source 1..22: mol_type = other RNA
gatcttgggtagcctggtgtct

SEQ ID NO: 24048 - RNA, 22 nt, synthetic construct
  source 1..22: mol_type = other RNA
gatgaattctgttctcgtgaat

SEQ ID NO: 24049 - RNA, 22 nt, synthetic construct
  source 1..22: mol_type = other RNA
gatgacatttgaatctgcagga

SEQ ID NO: 24050 - RNA, 22 nt, synthetic construct
  source 1..22: mol_type = other RNA
gatgattgtcctaaaggaagat

SEQ ID NO: 24051 - RNA, 22 nt, synthetic construct
  source 1..22: mol_type = other RNA
gatgcaaaggggtagagagcct

SEQ ID NO: 24052 - RNA, 22 nt, synthetic construct
  source 1..22: mol_type = other RNA
gatgcataaggtccctggatag

SEQ ID NO: 24053 - RNA, 22 nt, synthetic construct
  source 1..22: mol_type = other RNA
gatgcctggtagggatgcaaag

SEQ ID NO: 24054 - RNA, 22 nt, synthetic construct
  source 1..22: mol_type = other RNA
gatgcctgtgtgatagcttcca

SEQ ID NO: 24055 - RNA, 22 nt, synthetic construct
  source 1..22: mol_type = other RNA
gatgctacactttggtggtgca

SEQ ID NO: 24056 - RNA, 22 nt, synthetic construct
  source 1..22: mol_type = other RNA
gatgcttagagctcctccaatc

SEQ ID NO: 24057 - RNA, 22 nt, synthetic construct
  source 1..22: mol_type = other RNA
gatggatcaaaagataacacta

SEQ ID NO: 24058 - RNA, 22 nt, synthetic construct
  source 1..22: mol_type = other RNA
gatggttttctctttttactga

SEQ ID NO: 24059 - RNA, 22 nt, synthetic construct
  source 1..22: mol_type = other RNA
gatgtaagatggatcaaaagat

SEQ ID NO: 24060 - RNA, 22 nt, synthetic construct
  source 1..22: mol_type = other RNA
gatgtctagccaactttaagta

SEQ ID NO: 24061 - RNA, 22 nt, synthetic construct
  source 1..22: mol_type = other RNA
gatgtgcctgccttggacaaca

SEQ ID NO: 24062 - RNA, 22 nt, synthetic construct
  source 1..22: mol_type = other RNA
gatgttgcctaacctcagatcc

SEQ ID NO: 24063 - RNA, 22 nt, synthetic construct
  source 1..22: mol_type = other RNA
gattaaaagcagcaagggtagc

SEQ ID NO: 24064 - RNA, 22 nt, synthetic construct
  source 1..22: mol_type = other RNA
gattacagaatacgtggacatt

SEQ ID NO: 24065 - RNA, 22 nt, synthetic construct
  source 1..22: mol_type = other RNA
gattatcactacttatcatttt

SEQ ID NO: 24066 - RNA, 22 nt, synthetic construct
  source 1..22: mol_type = other RNA
gattcaaatgtcatctcccctt

SEQ ID NO: 24067 - RNA, 22 nt, synthetic construct
  source 1..22: mol_type = other RNA
gattccattaaactgttacagg

SEQ ID NO: 24068 - RNA, 22 nt, synthetic construct
  source 1..22: mol_type = other RNA
gattctgtccctgaccgtcttc

SEQ ID NO: 24069 - RNA, 22 nt, synthetic construct
  source 1..22: mol_type = other RNA
gattggacacccctggtttaca

SEQ ID NO: 24070 - RNA, 22 nt, synthetic construct
  source 1..22: mol_type = other RNA
gattggaggagctctaagcatc

SEQ ID NO: 24071 - RNA, 22 nt, synthetic construct
  source 1..22: mol_type = other RNA
gattggttccaccacaaattaa

SEQ ID NO: 24072 - RNA, 22 nt, synthetic construct
  source 1..22: mol_type = other RNA
gattgtcctaaaggaagataga

SEQ ID NO: 24073 - RNA, 22 nt, synthetic construct
  source 1..22: mol_type = other RNA
gattgttttctataactcaaga

SEQ ID NO: 24074 - RNA, 22 nt, synthetic construct
  source 1..22: mol_type = other RNA
gatttaaattaccttaactatt

SEQ ID NO: 24075 - RNA, 22 nt, synthetic construct
  source 1..22: mol_type = other RNA
gatttaacctgatgctacactt

SEQ ID NO: 24076 - RNA, 22 nt, synthetic construct
  source 1..22: mol_type = other RNA
gatttgggtaactgcaattcat

SEQ ID NO: 24077 - RNA, 22 nt, synthetic construct
  source 1..22: mol_type = other RNA
gattttcattttatcctttttc

SEQ ID NO: 24078 - RNA, 22 nt, synthetic construct
  source 1..22: mol_type = other RNA
gcaaaggggtagagagcctggg

SEQ ID NO: 24079 - RNA, 22 nt, synthetic construct
  source 1..22: mol_type = other RNA
gcaacatctccctttttcttcc

SEQ ID NO: 24080 - RNA, 22 nt, synthetic construct
  source 1..22: mol_type = other RNA
gcaacgagactgcggattatca

SEQ ID NO: 24081 - RNA, 22 nt, synthetic construct
  source 1..22: mol_type = other RNA
gcaactctcactcatacttgat

SEQ ID NO: 24082 - RNA, 22 nt, synthetic construct
  source 1..22: mol_type = other RNA
gcaactgtggacagtatagctg

SEQ ID NO: 24083 - RNA, 22 nt, synthetic construct
  source 1..22: mol_type = other RNA
gcaagaactgtcttgggccaca

SEQ ID NO: 24084 - RNA, 22 nt, synthetic construct
  source 1..22: mol_type = other RNA
gcaagcgttaatgagtttggat

SEQ ID NO: 24085 - RNA, 22 nt, synthetic construct
  source 1..22: mol_type = other RNA
gcaagggtagcattccaaaaag

SEQ ID NO: 24086 - RNA, 22 nt, synthetic construct
  source 1..22: mol_type = other RNA
gcaagggtctcaaatggtataa

SEQ ID NO: 24087 - RNA, 22 nt, synthetic construct
  source 1..22: mol_type = other RNA
gcaagtacaacaaatggaaaat

SEQ ID NO: 24088 - RNA, 22 nt, synthetic construct
  source 1..22: mol_type = other RNA
gcaagttgtctaacccgcgggc

SEQ ID NO: 24089 - RNA, 22 nt, synthetic construct
  source 1..22: mol_type = other RNA
gcaatataaaaagcatttggtg

SEQ ID NO: 24090 - RNA, 22 nt, synthetic construct
  source 1..22: mol_type = other RNA
gcaatgacaacaaccccagaat

SEQ ID NO: 24091 - RNA, 22 nt, synthetic construct
  source 1..22: mol_type = other RNA
gcaattcattccatgtgacttc

SEQ ID NO: 24092 - RNA, 22 nt, synthetic construct
  source 1..22: mol_type = other RNA
gcaatttggaagctatcacaca

SEQ ID NO: 24093 - RNA, 22 nt, synthetic construct
  source 1..22: mol_type = other RNA
gcacatctttaaaaatggtttg

SEQ ID NO: 24094 - RNA, 22 nt, synthetic construct
  source 1..22: mol_type = other RNA
gcaccaccaaagtgtagcatca

SEQ ID NO: 24095 - RNA, 22 nt, synthetic construct
  source 1..22: mol_type = other RNA
gcactagctttctccctctctt

SEQ ID NO: 24096 - RNA, 22 nt, synthetic construct
  source 1..22: mol_type = other RNA
gcactgctgggtaagagtcaag

SEQ ID NO: 24097 - RNA, 22 nt, synthetic construct
  source 1..22: mol_type = other RNA
gcactggtttctcaagcaaaag

SEQ ID NO: 24098 - RNA, 22 nt, synthetic construct
  source 1..22: mol_type = other RNA
gcagattcaaatgtcatctccc

SEQ ID NO: 24099 - RNA, 22 nt, synthetic construct
  source 1..22: mol_type = other RNA
gcagcaagggtagcattccaaa

SEQ ID NO: 24100 - RNA, 22 nt, synthetic construct
  source 1..22: mol_type = other RNA
gcagcaagggtctcaaatggta

SEQ ID NO: 24101 - RNA, 22 nt, synthetic construct
  source 1..22: mol_type = other RNA
gcaggattaaaagcagcaaggg

SEQ ID NO: 24102 - RNA, 22 nt, synthetic construct
  source 1..22: mol_type = other RNA
gcaggcacatctttaaaaatgg

SEQ ID NO: 24103 - RNA, 22 nt, synthetic construct
  source 1..22: mol_type = other RNA
gcagtaaggaaataaaagctga

SEQ ID NO: 24104 - RNA, 22 nt, synthetic construct
  source 1..22: mol_type = other RNA
gcagtacaaactgctcaggagt

SEQ ID NO: 24105 - RNA, 22 nt, synthetic construct
  source 1..22: mol_type = other RNA
gcagtagtcaagatcacctgga

SEQ ID NO: 24106 - RNA, 22 nt, synthetic construct
  source 1..22: mol_type = other RNA
gcagtgcttttattcctcccta

SEQ ID NO: 24107 - RNA, 22 nt, synthetic construct
  source 1..22: mol_type = other RNA
gcagtgtggcccagggaagccg

SEQ ID NO: 24108 - RNA, 22 nt, synthetic construct
  source 1..22: mol_type = other RNA
gcagttaaatgaaatgtaatgg

SEQ ID NO: 24109 - RNA, 22 nt, synthetic construct
  source 1..22: mol_type = other RNA
gcagttacccaaatcatagaga

SEQ ID NO: 24110 - RNA, 22 nt, synthetic construct
  source 1..22: mol_type = other RNA
gcagtttgggtcatagaacaac

SEQ ID NO: 24111 - RNA, 22 nt, synthetic construct
  source 1..22: mol_type = other RNA
gcagtttgtactgcgtgggtca

SEQ ID NO: 24112 - RNA, 22 nt, synthetic construct
  source 1..22: mol_type = other RNA
gcagttttcttctgactcctga

SEQ ID NO: 24113 - RNA, 22 nt, synthetic construct
  source 1..22: mol_type = other RNA
gcataaggtccctggatagact

SEQ ID NO: 24114 - RNA, 22 nt, synthetic construct
  source 1..22: mol_type = other RNA
gcataatgaattttagggaggt

SEQ ID NO: 24115 - RNA, 22 nt, synthetic construct
  source 1..22: mol_type = other RNA
gcatcacattcacgagaacaga

SEQ ID NO: 24116 - RNA, 22 nt, synthetic construct
  source 1..22: mol_type = other RNA
gcatcatatcttgagttataga

SEQ ID NO: 24117 - RNA, 22 nt, synthetic construct
  source 1..22: mol_type = other RNA
gcatccctaccaggcatcttag

SEQ ID NO: 24118 - RNA, 22 nt, synthetic construct
  source 1..22: mol_type = other RNA
gcatctgagatcagttactaac

SEQ ID NO: 24119 - RNA, 22 nt, synthetic construct
  source 1..22: mol_type = other RNA
gcatcttagcaactctcactca

SEQ ID NO: 24120 - RNA, 22 nt, synthetic construct
  source 1..22: mol_type = other RNA
gcatgaaaatgacaggtgaaac

SEQ ID NO: 24121 - RNA, 22 nt, synthetic construct
  source 1..22: mol_type = other RNA
gcatgaccaaaggggagatgac

SEQ ID NO: 24122 - RNA, 22 nt, synthetic construct
  source 1..22: mol_type = other RNA
gcatgatcacctgagttttata

SEQ ID NO: 24123 - RNA, 22 nt, synthetic construct
  source 1..22: mol_type = other RNA
gcatgggacccaggacagcttt

SEQ ID NO: 24124 - RNA, 22 nt, synthetic construct
  source 1..22: mol_type = other RNA
gcattcaaagctgtcctgggtc

SEQ ID NO: 24125 - RNA, 22 nt, synthetic construct
  source 1..22: mol_type = other RNA
gcattccaaaaagaaccacccc

SEQ ID NO: 24126 - RNA, 22 nt, synthetic construct
  source 1..22: mol_type = other RNA
gcattggaaaagtggctggtat

SEQ ID NO: 24127 - RNA, 22 nt, synthetic construct
  source 1..22: mol_type = other RNA
gcatttggtgttaaaatgttgg

SEQ ID NO: 24128 - RNA, 22 nt, synthetic construct
  source 1..22: mol_type = other RNA
gcatttttctagagacagacat

SEQ ID NO: 24129 - RNA, 22 nt, synthetic construct
  source 1..22: mol_type = other RNA
gccaactttaagtaaatggagt

SEQ ID NO: 24130 - RNA, 22 nt, synthetic construct
  source 1..22: mol_type = other RNA
gccacactgcaagaactgtctt

SEQ ID NO: 24131 - RNA, 22 nt, synthetic construct
  source 1..22: mol_type = other RNA
gccacatataaaggacagctga

SEQ ID NO: 24132 - RNA, 22 nt, synthetic construct
  source 1..22: mol_type = other RNA
gccacttttccaatgctcaaga

SEQ ID NO: 24133 - RNA, 22 nt, synthetic construct
  source 1..22: mol_type = other RNA
gccagagagcttcagcttttat

SEQ ID NO: 24134 - RNA, 22 nt, synthetic construct
  source 1..22: mol_type = other RNA
gccagtaatggagtttcacctg

SEQ ID NO: 24135 - RNA, 22 nt, synthetic construct
  source 1..22: mol_type = other RNA
gcccaagacagttcttgcagtg

SEQ ID NO: 24136 - RNA, 22 nt, synthetic construct
  source 1..22: mol_type = other RNA
gcccattacatttcatttaact

SEQ ID NO: 24137 - RNA, 22 nt, synthetic construct
  source 1..22: mol_type = other RNA
gccccagctcaagccttaattt

SEQ ID NO: 24138 - RNA, 22 nt, synthetic construct
  source 1..22: mol_type = other RNA
gccccggacttgttctgtggat

SEQ ID NO: 24139 - RNA, 22 nt, synthetic construct
  source 1..22: mol_type = other RNA
gcccgcgggttagacaacttgc

SEQ ID NO: 24140 - RNA, 22 nt, synthetic construct
  source 1..22: mol_type = other RNA
gcccttttaaaaaagcagtttt

SEQ ID NO: 24141 - RNA, 22 nt, synthetic construct
  source 1..22: mol_type = other RNA
gccgaaagattggacacccctg

SEQ ID NO: 24142 - RNA, 22 nt, synthetic construct
  source 1..22: mol_type = other RNA
gccgcatgggacccaggacagc

SEQ ID NO: 24143 - RNA, 22 nt, synthetic construct
  source 1..22: mol_type = other RNA
gcctaaatttctgtcctacaag

SEQ ID NO: 24144 - RNA, 22 nt, synthetic construct
  source 1..22: mol_type = other RNA
gcctaacctcagatccaattct

SEQ ID NO: 24145 - RNA, 22 nt, synthetic construct
  source 1..22: mol_type = other RNA
gcctgccttggacaacagtgaa

SEQ ID NO: 24146 - RNA, 22 nt, synthetic construct
  source 1..22: mol_type = other RNA
gcctggggagagagggtgaggg

SEQ ID NO: 24147 - RNA, 22 nt, synthetic construct
  source 1..22: mol_type = other RNA
gcctggtagggatgcaaagggg

SEQ ID NO: 24148 - RNA, 22 nt, synthetic construct
  source 1..22: mol_type = other RNA
gcctggtgtctcgcgaaaccag

SEQ ID NO: 24149 - RNA, 22 nt, synthetic construct
  source 1..22: mol_type = other RNA
gcctgtgtgatagcttccaaat

SEQ ID NO: 24150 - RNA, 22 nt, synthetic construct
  source 1..22: mol_type = other RNA
gccttaatttgtggtggaacca

SEQ ID NO: 24151 - RNA, 22 nt, synthetic construct
  source 1..22: mol_type = other RNA
gccttccatggtctgttgttct

SEQ ID NO: 24152 - RNA, 22 nt, synthetic construct
  source 1..22: mol_type = other RNA
gccttggacaacagtgaaagca

SEQ ID NO: 24153 - RNA, 22 nt, synthetic construct
  source 1..22: mol_type = other RNA
gcgaaaccagacagattggttc

SEQ ID NO: 24154 - RNA, 22 nt, synthetic construct
  source 1..22: mol_type = other RNA
gcgacatgtaaatgtctttatg

SEQ ID NO: 24155 - RNA, 22 nt, synthetic construct
  source 1..22: mol_type = other RNA
gcgagacaccaggctacccaag

SEQ ID NO: 24156 - RNA, 22 nt, synthetic construct
  source 1..22: mol_type = other RNA
gcggattatcactacttatcat

SEQ ID NO: 24157 - RNA, 22 nt, synthetic construct
  source 1..22: mol_type = other RNA
gcggcccgcgggttagacaact

SEQ ID NO: 24158 - RNA, 22 nt, synthetic construct
  source 1..22: mol_type = other RNA
gcgggccgcatgggacccagga

SEQ ID NO: 24159 - RNA, 22 nt, synthetic construct
  source 1..22: mol_type = other RNA
gcgggttagacaacttgctgta

SEQ ID NO: 24160 - RNA, 22 nt, synthetic construct
  source 1..22: mol_type = other RNA
gcgtgggtcatagtaattctgg

SEQ ID NO: 24161 - RNA, 22 nt, synthetic construct
  source 1..22: mol_type = other RNA
gctaagatgcctggtagggatg

SEQ ID NO: 24162 - RNA, 22 nt, synthetic construct
  source 1..22: mol_type = other RNA
gctaaggaaaaaggataaaatg

SEQ ID NO: 24163 - RNA, 22 nt, synthetic construct
  source 1..22: mol_type = other RNA
gctaagtccaacaaaccatttt

SEQ ID NO: 24164 - RNA, 22 nt, synthetic construct
  source 1..22: mol_type = other RNA
gctacactttggtggtgcagca

SEQ ID NO: 24165 - RNA, 22 nt, synthetic construct
  source 1..22: mol_type = other RNA
gctacagctatactgtccacag

SEQ ID NO: 24166 - RNA, 22 nt, synthetic construct
  source 1..22: mol_type = other RNA
gctacatagttaaatatatcag

SEQ ID NO: 24167 - RNA, 22 nt, synthetic construct
  source 1..22: mol_type = other RNA
gctacccaagatcaagagaggg

SEQ ID NO: 24168 - RNA, 22 nt, synthetic construct
  source 1..22: mol_type = other RNA
gctacccttgctgcttttaatc

SEQ ID NO: 24169 - RNA, 22 nt, synthetic construct
  source 1..22: mol_type = other RNA
gctagacatcagagtatactag

SEQ ID NO: 24170 - RNA, 22 nt, synthetic construct
  source 1..22: mol_type = other RNA
gctagtgctatgtctgaatact

SEQ ID NO: 24171 - RNA, 22 nt, synthetic construct
  source 1..22: mol_type = other RNA
gctatactgtccacagttgcaa

SEQ ID NO: 24172 - RNA, 22 nt, synthetic construct
  source 1..22: mol_type = other RNA
gctatcacacaggcatctgaga

SEQ ID NO: 24173 - RNA, 22 nt, synthetic construct
  source 1..22: mol_type = other RNA
gctatgtctgaatactagagga

SEQ ID NO: 24174 - RNA, 22 nt, synthetic construct
  source 1..22: mol_type = other RNA
gctcaagattaataaaatgtca

SEQ ID NO: 24175 - RNA, 22 nt, synthetic construct
  source 1..22: mol_type = other RNA
gctcaagccttaatttgtggtg

SEQ ID NO: 24176 - RNA, 22 nt, synthetic construct
  source 1..22: mol_type = other RNA
gctcactccatttacttaaagt

SEQ ID NO: 24177 - RNA, 22 nt, synthetic construct
  source 1..22: mol_type = other RNA
gctcagaatagttaaggtaatt

SEQ ID NO: 24178 - RNA, 22 nt, synthetic construct
  source 1..22: mol_type = other RNA
gctcaggagtacaagacactat

SEQ ID NO: 24179 - RNA, 22 nt, synthetic construct
  source 1..22: mol_type = other RNA
gctcaggagtcagaagaaaact

SEQ ID NO: 24180 - RNA, 22 nt, synthetic construct
  source 1..22: mol_type = other RNA
gctcagtaaaaagagaaaacca

SEQ ID NO: 24181 - RNA, 22 nt, synthetic construct
  source 1..22: mol_type = other RNA
gctcatcagctgtcctttatat

SEQ ID NO: 24182 - RNA, 22 nt, synthetic construct
  source 1..22: mol_type = other RNA
gctccaaaaatgataagtagtg

SEQ ID NO: 24183 - RNA, 22 nt, synthetic construct
  source 1..22: mol_type = other RNA
gctcctagtatactctgatgtc

SEQ ID NO: 24184 - RNA, 22 nt, synthetic construct
  source 1..22: mol_type = other RNA
gctcctccaatcaagtgtttcc

SEQ ID NO: 24185 - RNA, 22 nt, synthetic construct
  source 1..22: mol_type = other RNA
gctcctctagtattcagacata

SEQ ID NO: 24186 - RNA, 22 nt, synthetic construct
  source 1..22: mol_type = other RNA
gctcctgtaacagtttaatgga

SEQ ID NO: 24187 - RNA, 22 nt, synthetic construct
  source 1..22: mol_type = other RNA
gctctaagcatcatatcttgag

SEQ ID NO: 24188 - RNA, 22 nt, synthetic construct
  source 1..22: mol_type = other RNA
gctctatcttcctttaggacaa

SEQ ID NO: 24189 - RNA, 22 nt, synthetic construct
  source 1..22: mol_type = other RNA
gctctctacccctttgcatccc

SEQ ID NO: 24190 - RNA, 22 nt, synthetic construct
  source 1..22: mol_type = other RNA
gctctctggcccattacatttc

SEQ ID NO: 24191 - RNA, 22 nt, synthetic construct
  source 1..22: mol_type = other RNA
gctgaaagctaagtccaacaaa

SEQ ID NO: 24192 - RNA, 22 nt, synthetic construct
  source 1..22: mol_type = other RNA
gctgaagctctctggcccatta

SEQ ID NO: 24193 - RNA, 22 nt, synthetic construct
  source 1..22: mol_type = other RNA
gctgatttaaattaccttaact

SEQ ID NO: 24194 - RNA, 22 nt, synthetic construct
  source 1..22: mol_type = other RNA
gctgcaccaccaaagtgtagca

SEQ ID NO: 24195 - RNA, 22 nt, synthetic construct
  source 1..22: mol_type = other RNA
gctgcttttaatcctgcagatt

SEQ ID NO: 24196 - RNA, 22 nt, synthetic construct
  source 1..22: mol_type = other RNA
gctgggattctgtccctgaccg

SEQ ID NO: 24197 - RNA, 22 nt, synthetic construct
  source 1..22: mol_type = other RNA
gctggggcttgactcttaccca

SEQ ID NO: 24198 - RNA, 22 nt, synthetic construct
  source 1..22: mol_type = other RNA
gctgggtaagagtcaagcccca

SEQ ID NO: 24199 - RNA, 22 nt, synthetic construct
  source 1..22: mol_type = other RNA
gctgggttcatttgtatcacac

SEQ ID NO: 24200 - RNA, 22 nt, synthetic construct
  source 1..22: mol_type = other RNA
gctggtatgactaaagaactga

SEQ ID NO: 24201 - RNA, 22 nt, synthetic construct
  source 1..22: mol_type = other RNA
gctgtaaacagtacaagccagt

SEQ ID NO: 24202 - RNA, 22 nt, synthetic construct
  source 1..22: mol_type = other RNA
gctgtagccccggacttgttct

SEQ ID NO: 24203 - RNA, 22 nt, synthetic construct
  source 1..22: mol_type = other RNA
gctgtcctgggtcccatgcggc

SEQ ID NO: 24204 - RNA, 22 nt, synthetic construct
  source 1..22: mol_type = other RNA
gctgtcctttatatgtggccca

SEQ ID NO: 24205 - RNA, 22 nt, synthetic construct
  source 1..22: mol_type = other RNA
gctgtctctgtctttagtgtta

SEQ ID NO: 24206 - RNA, 22 nt, synthetic construct
  source 1..22: mol_type = other RNA
gctgttaaattgaggaaagtct

SEQ ID NO: 24207 - RNA, 22 nt, synthetic construct
  source 1..22: mol_type = other RNA
gcttagagctcctccaatcaag

SEQ ID NO: 24208 - RNA, 22 nt, synthetic construct
  source 1..22: mol_type = other RNA
gcttcagcttttatttccttac

SEQ ID NO: 24209 - RNA, 22 nt, synthetic construct
  source 1..22: mol_type = other RNA
gcttccaaattgctgtctctgt

SEQ ID NO: 24210 - RNA, 22 nt, synthetic construct
  source 1..22: mol_type = other RNA
gcttccctccctcaccctctct

SEQ ID NO: 24211 - RNA, 22 nt, synthetic construct
  source 1..22: mol_type = other RNA
gcttccctgggccacactgcaa

SEQ ID NO: 24212 - RNA, 22 nt, synthetic construct
  source 1..22: mol_type = other RNA
gcttgactcttacccagcagtg

SEQ ID NO: 24213 - RNA, 22 nt, synthetic construct
  source 1..22: mol_type = other RNA
gcttgagaaaccagtgcttccc

SEQ ID NO: 24214 - RNA, 22 nt, synthetic construct
  source 1..22: mol_type = other RNA
gcttgagctggggcttgactct

SEQ ID NO: 24215 - RNA, 22 nt, synthetic construct
  source 1..22: mol_type = other RNA
gcttgctttcactgttgtccaa

SEQ ID NO: 24216 - RNA, 22 nt, synthetic construct
  source 1..22: mol_type = other RNA
gcttgtactgtttacagcaagt

SEQ ID NO: 24217 - RNA, 22 nt, synthetic construct
  source 1..22: mol_type = other RNA
gctttacagagaattggatctg

SEQ ID NO: 24218 - RNA, 22 nt, synthetic construct
  source 1..22: mol_type = other RNA
gctttatgtctgtctctagaaa

SEQ ID NO: 24219 - RNA, 22 nt, synthetic construct
  source 1..22: mol_type = other RNA
gctttcactgttgtccaaggca

SEQ ID NO: 24220 - RNA, 22 nt, synthetic construct
  source 1..22: mol_type = other RNA
gctttctccctctcttgatctt

SEQ ID NO: 24221 - RNA, 22 nt, synthetic construct
  source 1..22: mol_type = other RNA
gcttttaatcctgcagattcaa

SEQ ID NO: 24222 - RNA, 22 nt, synthetic construct
  source 1..22: mol_type = other RNA
gcttttattcctccctagttca

SEQ ID NO: 24223 - RNA, 22 nt, synthetic construct
  source 1..22: mol_type = other RNA
gcttttatttccttactgctca

SEQ ID NO: 24224 - RNA, 22 nt, synthetic construct
  source 1..22: mol_type = other RNA
gcttttgcttgagaaaccagtg

SEQ ID NO: 24225 - RNA, 22 nt, synthetic construct
  source 1..22: mol_type = other RNA
gctttttcatttttcactattt

SEQ ID NO: 24226 - RNA, 22 nt, synthetic construct
  source 1..22: mol_type = other RNA
gctttttgaaggaatagtgtct

SEQ ID NO: 24227 - RNA, 22 nt, synthetic construct
  source 1..22: mol_type = other RNA
gcttttttaaaagggcagtttg

SEQ ID NO: 24228 - RNA, 22 nt, synthetic construct
  source 1..22: mol_type = other RNA
ggaaaagtggctggtatgacta

SEQ ID NO: 24229 - RNA, 22 nt, synthetic construct
  source 1..22: mol_type = other RNA
ggaaaatagtgaaaaatgaaaa

SEQ ID NO: 24230 - RNA, 22 nt, synthetic construct
  source 1..22: mol_type = other RNA
ggaaaatgggatcaagtatgag

SEQ ID NO: 24231 - RNA, 22 nt, synthetic construct
  source 1..22: mol_type = other RNA
ggaaacacttgattggaggagc

SEQ ID NO: 24232 - RNA, 22 nt, synthetic construct
  source 1..22: mol_type = other RNA
ggaaagtctatccagggacctt

SEQ ID NO: 24233 - RNA, 22 nt, synthetic construct
  source 1..22: mol_type = other RNA
ggaaataaaagctgaagctctc

SEQ ID NO: 24234 - RNA, 22 nt, synthetic construct
  source 1..22: mol_type = other RNA
ggaaccaatctgtctggtttcg

SEQ ID NO: 24235 - RNA, 22 nt, synthetic construct
  source 1..22: mol_type = other RNA
ggaagaaaaagggagatgttgc

SEQ ID NO: 24236 - RNA, 22 nt, synthetic construct
  source 1..22: mol_type = other RNA
ggaagatagagcatgaaaatga

SEQ ID NO: 24237 - RNA, 22 nt, synthetic construct
  source 1..22: mol_type = other RNA
ggaagcactggtttctcaagca

SEQ ID NO: 24238 - RNA, 22 nt, synthetic construct
  source 1..22: mol_type = other RNA
ggaagccgaaagattggacacc

SEQ ID NO: 24239 - RNA, 22 nt, synthetic construct
  source 1..22: mol_type = other RNA
ggaagctatcacacaggcatct

SEQ ID NO: 24240 - RNA, 22 nt, synthetic construct
  source 1..22: mol_type = other RNA
ggaaggcatgaccaaaggggag

SEQ ID NO: 24241 - RNA, 22 nt, synthetic construct
  source 1..22: mol_type = other RNA
ggaagtgaaaacttgtaggaca

SEQ ID NO: 24242 - RNA, 22 nt, synthetic construct
  source 1..22: mol_type = other RNA
ggaataaaagcactgctgggta

SEQ ID NO: 24243 - RNA, 22 nt, synthetic construct
  source 1..22: mol_type = other RNA
ggaatagtgtcttgtactcctg

SEQ ID NO: 24244 - RNA, 22 nt, synthetic construct
  source 1..22: mol_type = other RNA
ggaatctcacctccctaaaatt

SEQ ID NO: 24245 - RNA, 22 nt, synthetic construct
  source 1..22: mol_type = other RNA
ggaatgaattgcagttacccaa

SEQ ID NO: 24246 - RNA, 22 nt, synthetic construct
  source 1..22: mol_type = other RNA
ggaatgctacccttgctgcttt

SEQ ID NO: 24247 - RNA, 22 nt, synthetic construct
  source 1..22: mol_type = other RNA
ggaattataataccaacatttt

SEQ ID NO: 24248 - RNA, 22 nt, synthetic construct
  source 1..22: mol_type = other RNA
ggacaacagtgaaagcaagcgt

SEQ ID NO: 24249 - RNA, 22 nt, synthetic construct
  source 1..22: mol_type = other RNA
ggacaatcatcctaacaagatg

SEQ ID NO: 24250 - RNA, 22 nt, synthetic construct
  source 1..22: mol_type = other RNA
ggacacccctggtttacaggat

SEQ ID NO: 24251 - RNA, 22 nt, synthetic construct
  source 1..22: mol_type = other RNA
ggacagaaatttaggctgggtt

SEQ ID NO: 24252 - RNA, 22 nt, synthetic construct
  source 1..22: mol_type = other RNA
ggacagaatcccagctaaggaa

SEQ ID NO: 24253 - RNA, 22 nt, synthetic construct
  source 1..22: mol_type = other RNA
ggacagtatagctgtagccccg

SEQ ID NO: 24254 - RNA, 22 nt, synthetic construct
  source 1..22: mol_type = other RNA
ggacattgatggttttctcttt

SEQ ID NO: 24255 - RNA, 22 nt, synthetic construct
  source 1..22: mol_type = other RNA
ggacccaggacagctttgaatg

SEQ ID NO: 24256 - RNA, 22 nt, synthetic construct
  source 1..22: mol_type = other RNA
ggaccttatgcatcacattcac

SEQ ID NO: 24257 - RNA, 22 nt, synthetic construct
  source 1..22: mol_type = other RNA
ggactgtgaagacggtcaggga

SEQ ID NO: 24258 - RNA, 22 nt, synthetic construct
  source 1..22: mol_type = other RNA
ggacttagctttcagctaaata

SEQ ID NO: 24259 - RNA, 22 nt, synthetic construct
  source 1..22: mol_type = other RNA
ggacttgttctgtggattacag

SEQ ID NO: 24260 - RNA, 22 nt, synthetic construct
  source 1..22: mol_type = other RNA
ggagaaagctagtgctatgtct

SEQ ID NO: 24261 - RNA, 22 nt, synthetic construct
  source 1..22: mol_type = other RNA
ggagagagggtgagggagggaa

SEQ ID NO: 24262 - RNA, 22 nt, synthetic construct
  source 1..22: mol_type = other RNA
ggagagaggtcatatttgtgtg

SEQ ID NO: 24263 - RNA, 22 nt, synthetic construct
  source 1..22: mol_type = other RNA
ggagatgacatttgaatctgca

SEQ ID NO: 24264 - RNA, 22 nt, synthetic construct
  source 1..22: mol_type = other RNA
ggagatgttgcctaacctcaga

SEQ ID NO: 24265 - RNA, 22 nt, synthetic construct
  source 1..22: mol_type = other RNA
ggagcaagtacaacaaatggaa

SEQ ID NO: 24266 - RNA, 22 nt, synthetic construct
  source 1..22: mol_type = other RNA
ggagcatttttctagagacaga

SEQ ID NO: 24267 - RNA, 22 nt, synthetic construct
  source 1..22: mol_type = other RNA
ggagctacatagttaaatatat

SEQ ID NO: 24268 - RNA, 22 nt, synthetic construct
  source 1..22: mol_type = other RNA
ggagctcaggagtacaagacac

SEQ ID NO: 24269 - RNA, 22 nt, synthetic construct
  source 1..22: mol_type = other RNA
ggagctctaagcatcatatctt

SEQ ID NO: 24270 - RNA, 22 nt, synthetic construct
  source 1..22: mol_type = other RNA
ggaggaataaaagcactgctgg

SEQ ID NO: 24271 - RNA, 22 nt, synthetic construct
  source 1..22: mol_type = other RNA
ggaggagctctaagcatcatat

SEQ ID NO: 24272 - RNA, 22 nt, synthetic construct
  source 1..22: mol_type = other RNA
ggagggaagcactggtttctca

SEQ ID NO: 24273 - RNA, 22 nt, synthetic construct
  source 1..22: mol_type = other RNA
ggaggtgagattccattaaact

SEQ ID NO: 24274 - RNA, 22 nt, synthetic construct
  source 1..22: mol_type = other RNA
ggagtacaagacactattcctt

SEQ ID NO: 24275 - RNA, 22 nt, synthetic construct
  source 1..22: mol_type = other RNA
ggagtcagaagaaaactgcttt

SEQ ID NO: 24276 - RNA, 22 nt, synthetic construct
  source 1..22: mol_type = other RNA
ggagtgagcgacatgtaaatgt

SEQ ID NO: 24277 - RNA, 22 nt, synthetic construct
  source 1..22: mol_type = other RNA
ggagtttcacctgtcattttca

SEQ ID NO: 24278 - RNA, 22 nt, synthetic construct
  source 1..22: mol_type = other RNA
ggataaaacttactttgtgatt

SEQ ID NO: 24279 - RNA, 22 nt, synthetic construct
  source 1..22: mol_type = other RNA
ggatagactttcctcaatttaa

SEQ ID NO: 24280 - RNA, 22 nt, synthetic construct
  source 1..22: mol_type = other RNA
ggatcaaaagataacactaaag

SEQ ID NO: 24281 - RNA, 22 nt, synthetic construct
  source 1..22: mol_type = other RNA
ggatcaagtatgagtgagagtt

SEQ ID NO: 24282 - RNA, 22 nt, synthetic construct
  source 1..22: mol_type = other RNA
ggatctgaggttaggcaacatc

SEQ ID NO: 24283 - RNA, 22 nt, synthetic construct
  source 1..22: mol_type = other RNA
ggatgaattctgttctcgtgaa

SEQ ID NO: 24284 - RNA, 22 nt, synthetic construct
  source 1..22: mol_type = other RNA
ggatgattgtcctaaaggaaga

SEQ ID NO: 24285 - RNA, 22 nt, synthetic construct
  source 1..22: mol_type = other RNA
ggatgcaaaggggtagagagcc

SEQ ID NO: 24286 - RNA, 22 nt, synthetic construct
  source 1..22: mol_type = other RNA
ggattaaaagcagcaagggtag

SEQ ID NO: 24287 - RNA, 22 nt, synthetic construct
  source 1..22: mol_type = other RNA
ggattacagaatacgtggacat

SEQ ID NO: 24288 - RNA, 22 nt, synthetic construct
  source 1..22: mol_type = other RNA
ggattatcactacttatcattt

SEQ ID NO: 24289 - RNA, 22 nt, synthetic construct
  source 1..22: mol_type = other RNA
ggattctgtccctgaccgtctt

SEQ ID NO: 24290 - RNA, 22 nt, synthetic construct
  source 1..22: mol_type = other RNA
ggcaacatctccctttttcttc

SEQ ID NO: 24291 - RNA, 22 nt, synthetic construct
  source 1..22: mol_type = other RNA
ggcacatctttaaaaatggttt

SEQ ID NO: 24292 - RNA, 22 nt, synthetic construct
  source 1..22: mol_type = other RNA
ggcaggcacatctttaaaaatg

SEQ ID NO: 24293 - RNA, 22 nt, synthetic construct
  source 1..22: mol_type = other RNA
ggcagtttgggtcatagaacaa

SEQ ID NO: 24294 - RNA, 22 nt, synthetic construct
  source 1..22: mol_type = other RNA
ggcatctgagatcagttactaa

SEQ ID NO: 24295 - RNA, 22 nt, synthetic construct
  source 1..22: mol_type = other RNA
ggcatcttagcaactctcactc

SEQ ID NO: 24296 - RNA, 22 nt, synthetic construct
  source 1..22: mol_type = other RNA
ggcatgaccaaaggggagatga

SEQ ID NO: 24297 - RNA, 22 nt, synthetic construct
  source 1..22: mol_type = other RNA
ggccacactgcaagaactgtct

SEQ ID NO: 24298 - RNA, 22 nt, synthetic construct
  source 1..22: mol_type = other RNA
ggccacatataaaggacagctg

SEQ ID NO: 24299 - RNA, 22 nt, synthetic construct
  source 1..22: mol_type = other RNA
ggccagagagcttcagctttta

SEQ ID NO: 24300 - RNA, 22 nt, synthetic construct
  source 1..22: mol_type = other RNA
ggcccaagacagttcttgcagt

SEQ ID NO: 24301 - RNA, 22 nt, synthetic construct
  source 1..22: mol_type = other RNA
ggcccattacatttcatttaac

SEQ ID NO: 24302 - RNA, 22 nt, synthetic construct
  source 1..22: mol_type = other RNA
ggcccgcgggttagacaacttg

SEQ ID NO: 24303 - RNA, 22 nt, synthetic construct
  source 1..22: mol_type = other RNA
ggccgcatgggacccaggacag

SEQ ID NO: 24304 - RNA, 22 nt, synthetic construct
  source 1..22: mol_type = other RNA
ggctacagctatactgtccaca

SEQ ID NO: 24305 - RNA, 22 nt, synthetic construct
  source 1..22: mol_type = other RNA
ggctacccaagatcaagagagg

SEQ ID NO: 24306 - RNA, 22 nt, synthetic construct
  source 1..22: mol_type = other RNA
ggctagacatcagagtatacta

SEQ ID NO: 24307 - RNA, 22 nt, synthetic construct
  source 1..22: mol_type = other RNA
ggctctctacccctttgcatcc

SEQ ID NO: 24308 - RNA, 22 nt, synthetic construct
  source 1..22: mol_type = other RNA
ggctgggttcatttgtatcaca

SEQ ID NO: 24309 - RNA, 22 nt, synthetic construct
  source 1..22: mol_type = other RNA
ggctggtatgactaaagaactg

SEQ ID NO: 24310 - RNA, 22 nt, synthetic construct
  source 1..22: mol_type = other RNA
ggcttccctgggccacactgca

SEQ ID NO: 24311 - RNA, 22 nt, synthetic construct
  source 1..22: mol_type = other RNA
ggcttgactcttacccagcagt

SEQ ID NO: 24312 - RNA, 22 nt, synthetic construct
  source 1..22: mol_type = other RNA
ggcttgagctggggcttgactc

SEQ ID NO: 24313 - RNA, 22 nt, synthetic construct
  source 1..22: mol_type = other RNA
ggcttgtactgtttacagcaag

SEQ ID NO: 24314 - RNA, 22 nt, synthetic construct
  source 1..22: mol_type = other RNA
gggaagcactggtttctcaagc

SEQ ID NO: 24315 - RNA, 22 nt, synthetic construct
  source 1..22: mol_type = other RNA
gggaagccgaaagattggacac

SEQ ID NO: 24316 - RNA, 22 nt, synthetic construct
  source 1..22: mol_type = other RNA
gggacagaatcccagctaagga

SEQ ID NO: 24317 - RNA, 22 nt, synthetic construct
  source 1..22: mol_type = other RNA
gggacccaggacagctttgaat

SEQ ID NO: 24318 - RNA, 22 nt, synthetic construct
  source 1..22: mol_type = other RNA
gggaccttatgcatcacattca

SEQ ID NO: 24319 - RNA, 22 nt, synthetic construct
  source 1..22: mol_type = other RNA
gggagaaagctagtgctatgtc

SEQ ID NO: 24320 - RNA, 22 nt, synthetic construct
  source 1..22: mol_type = other RNA
gggagagagggtgagggaggga

SEQ ID NO: 24321 - RNA, 22 nt, synthetic construct
  source 1..22: mol_type = other RNA
gggagatgacatttgaatctgc

SEQ ID NO: 24322 - RNA, 22 nt, synthetic construct
  source 1..22: mol_type = other RNA
gggagatgttgcctaacctcag

SEQ ID NO: 24323 - RNA, 22 nt, synthetic construct
  source 1..22: mol_type = other RNA
gggaggaataaaagcactgctg

SEQ ID NO: 24324 - RNA, 22 nt, synthetic construct
  source 1..22: mol_type = other RNA
gggagggaagcactggtttctc

SEQ ID NO: 24325 - RNA, 22 nt, synthetic construct
  source 1..22: mol_type = other RNA
gggaggtgagattccattaaac

SEQ ID NO: 24326 - RNA, 22 nt, synthetic construct
  source 1..22: mol_type = other RNA
gggatcaagtatgagtgagagt

SEQ ID NO: 24327 - RNA, 22 nt, synthetic construct
  source 1..22: mol_type = other RNA
gggatgcaaaggggtagagagc

SEQ ID NO: 24328 - RNA, 22 nt, synthetic construct
  source 1..22: mol_type = other RNA
gggattctgtccctgaccgtct

SEQ ID NO: 24329 - RNA, 22 nt, synthetic construct
  source 1..22: mol_type = other RNA
gggcagtttgggtcatagaaca

SEQ ID NO: 24330 - RNA, 22 nt, synthetic construct
  source 1..22: mol_type = other RNA
gggccacactgcaagaactgtc

SEQ ID NO: 24331 - RNA, 22 nt, synthetic construct
  source 1..22: mol_type = other RNA
gggccacatataaaggacagct

SEQ ID NO: 24332 - RNA, 22 nt, synthetic construct
  source 1..22: mol_type = other RNA
gggccagagagcttcagctttt

SEQ ID NO: 24333 - RNA, 22 nt, synthetic construct
  source 1..22: mol_type = other RNA
gggccgcatgggacccaggaca

SEQ ID NO: 24334 - RNA, 22 nt, synthetic construct
  source 1..22: mol_type = other RNA
gggctacagctatactgtccac

SEQ ID NO: 24335 - RNA, 22 nt, synthetic construct
  source 1..22: mol_type = other RNA
gggcttgactcttacccagcag

SEQ ID NO: 24336 - RNA, 22 nt, synthetic construct
  source 1..22: mol_type = other RNA
ggggagagagggtgagggaggg

SEQ ID NO: 24337 - RNA, 22 nt, synthetic construct
  source 1..22: mol_type = other RNA
ggggagatgacatttgaatctg

SEQ ID NO: 24338 - RNA, 22 nt, synthetic construct
  source 1..22: mol_type = other RNA
ggggctacagctatactgtcca

SEQ ID NO: 24339 - RNA, 22 nt, synthetic construct
  source 1..22: mol_type = other RNA
ggggcttgactcttacccagca

SEQ ID NO: 24340 - RNA, 22 nt, synthetic construct
  source 1..22: mol_type = other RNA
ggggtagagagcctggggagag

SEQ ID NO: 24341 - RNA, 22 nt, synthetic construct
  source 1..22: mol_type = other RNA
ggggtggttctttttggaatgc

SEQ ID NO: 24342 - RNA, 22 nt, synthetic construct
  source 1..22: mol_type = other RNA
ggggttgttgtcattgctgatt

SEQ ID NO: 24343 - RNA, 22 nt, synthetic construct
  source 1..22: mol_type = other RNA
gggtaactgcaattcattccat

SEQ ID NO: 24344 - RNA, 22 nt, synthetic construct
  source 1..22: mol_type = other RNA
gggtaagagtcaagccccagct

SEQ ID NO: 24345 - RNA, 22 nt, synthetic construct
  source 1..22: mol_type = other RNA
gggtagagagcctggggagaga

SEQ ID NO: 24346 - RNA, 22 nt, synthetic construct
  source 1..22: mol_type = other RNA
gggtagcattccaaaaagaacc

SEQ ID NO: 24347 - RNA, 22 nt, synthetic construct
  source 1..22: mol_type = other RNA
gggtagcctggtgtctcgcgaa

SEQ ID NO: 24348 - RNA, 22 nt, synthetic construct
  source 1..22: mol_type = other RNA
gggtcatagaacaacagaccat

SEQ ID NO: 24349 - RNA, 22 nt, synthetic construct
  source 1..22: mol_type = other RNA
gggtcatagtaattctggggtt

SEQ ID NO: 24350 - RNA, 22 nt, synthetic construct
  source 1..22: mol_type = other RNA
gggtcccatgcggcccgcgggt

SEQ ID NO: 24351 - RNA, 22 nt, synthetic construct
  source 1..22: mol_type = other RNA
gggtcgcattcaaagctgtcct

SEQ ID NO: 24352 - RNA, 22 nt, synthetic construct
  source 1..22: mol_type = other RNA
gggtctcaaatggtataaaact

SEQ ID NO: 24353 - RNA, 22 nt, synthetic construct
  source 1..22: mol_type = other RNA
gggtgagggagggaagcactgg

SEQ ID NO: 24354 - RNA, 22 nt, synthetic construct
  source 1..22: mol_type = other RNA
gggtggttctttttggaatgct

SEQ ID NO: 24355 - RNA, 22 nt, synthetic construct
  source 1..22: mol_type = other RNA
gggttagacaacttgctgtaaa

SEQ ID NO: 24356 - RNA, 22 nt, synthetic construct
  source 1..22: mol_type = other RNA
gggttcatttgtatcacacaga

SEQ ID NO: 24357 - RNA, 22 nt, synthetic construct
  source 1..22: mol_type = other RNA
gggttgttgtcattgctgattt

SEQ ID NO: 24358 - RNA, 22 nt, synthetic construct
  source 1..22: mol_type = other RNA
ggtaactgcaattcattccatg

SEQ ID NO: 24359 - RNA, 22 nt, synthetic construct
  source 1..22: mol_type = other RNA
ggtaagaacagaaatgagaggt

SEQ ID NO: 24360 - RNA, 22 nt, synthetic construct
  source 1..22: mol_type = other RNA
ggtaagagtcaagccccagctc

SEQ ID NO: 24361 - RNA, 22 nt, synthetic construct
  source 1..22: mol_type = other RNA
ggtaatttaaatcagcaatgac

SEQ ID NO: 24362 - RNA, 22 nt, synthetic construct
  source 1..22: mol_type = other RNA
ggtagagagcctggggagagag

SEQ ID NO: 24363 - RNA, 22 nt, synthetic construct
  source 1..22: mol_type = other RNA
ggtagcattccaaaaagaacca

SEQ ID NO: 24364 - RNA, 22 nt, synthetic construct
  source 1..22: mol_type = other RNA
ggtagcctggtgtctcgcgaaa

SEQ ID NO: 24365 - RNA, 22 nt, synthetic construct
  source 1..22: mol_type = other RNA
ggtagggatgcaaaggggtaga

SEQ ID NO: 24366 - RNA, 22 nt, synthetic construct
  source 1..22: mol_type = other RNA
ggtataaaactcaggtgatcat

SEQ ID NO: 24367 - RNA, 22 nt, synthetic construct
  source 1..22: mol_type = other RNA
ggtattataattcctcaggata

SEQ ID NO: 24368 - RNA, 22 nt, synthetic construct
  source 1..22: mol_type = other RNA
ggtatttagaggaagaaaaagg

SEQ ID NO: 24369 - RNA, 22 nt, synthetic construct
  source 1..22: mol_type = other RNA
ggtcagggacagaatcccagct

SEQ ID NO: 24370 - RNA, 22 nt, synthetic construct
  source 1..22: mol_type = other RNA
ggtcatagaacaacagaccatg

SEQ ID NO: 24371 - RNA, 22 nt, synthetic construct
  source 1..22: mol_type = other RNA
ggtcatagtaattctggggttg

SEQ ID NO: 24372 - RNA, 22 nt, synthetic construct
  source 1..22: mol_type = other RNA
ggtcatatttgtgtgtgtagta

SEQ ID NO: 24373 - RNA, 22 nt, synthetic construct
  source 1..22: mol_type = other RNA
ggtcatgccttccatggtctgt

SEQ ID NO: 24374 - RNA, 22 nt, synthetic construct
  source 1..22: mol_type = other RNA
ggtcccatgcggcccgcgggtt

SEQ ID NO: 24375 - RNA, 22 nt, synthetic construct
  source 1..22: mol_type = other RNA
ggtccctggatagactttcctc

SEQ ID NO: 24376 - RNA, 22 nt, synthetic construct
  source 1..22: mol_type = other RNA
ggtcgcattcaaagctgtcctg

SEQ ID NO: 24377 - RNA, 22 nt, synthetic construct
  source 1..22: mol_type = other RNA
ggtctcaaatggtataaaactc

SEQ ID NO: 24378 - RNA, 22 nt, synthetic construct
  source 1..22: mol_type = other RNA
ggtctgtgtgatacaaatgaac

SEQ ID NO: 24379 - RNA, 22 nt, synthetic construct
  source 1..22: mol_type = other RNA
ggtctgttgttctatgacccaa

SEQ ID NO: 24380 - RNA, 22 nt, synthetic construct
  source 1..22: mol_type = other RNA
ggtgaaactccattactggctt

SEQ ID NO: 24381 - RNA, 22 nt, synthetic construct
  source 1..22: mol_type = other RNA
ggtgagattccattaaactgtt

SEQ ID NO: 24382 - RNA, 22 nt, synthetic construct
  source 1..22: mol_type = other RNA
ggtgagggagggaagcactggt

SEQ ID NO: 24383 - RNA, 22 nt, synthetic construct
  source 1..22: mol_type = other RNA
ggtgatcatgctttatgtctgt

SEQ ID NO: 24384 - RNA, 22 nt, synthetic construct
  source 1..22: mol_type = other RNA
ggtgatcttgactactgcttta

SEQ ID NO: 24385 - RNA, 22 nt, synthetic construct
  source 1..22: mol_type = other RNA
ggtgcagcaagggtctcaaatg

SEQ ID NO: 24386 - RNA, 22 nt, synthetic construct
  source 1..22: mol_type = other RNA
ggtggaaccaatctgtctggtt

SEQ ID NO: 24387 - RNA, 22 nt, synthetic construct
  source 1..22: mol_type = other RNA
ggtggtgcagcaagggtctcaa

SEQ ID NO: 24388 - RNA, 22 nt, synthetic construct
  source 1..22: mol_type = other RNA
ggtggttctttttggaatgcta

SEQ ID NO: 24389 - RNA, 22 nt, synthetic construct
  source 1..22: mol_type = other RNA
ggtgtctcgcgaaaccagacag

SEQ ID NO: 24390 - RNA, 22 nt, synthetic construct
  source 1..22: mol_type = other RNA
ggtgttaaaatgttggtattat

SEQ ID NO: 24391 - RNA, 22 nt, synthetic construct
  source 1..22: mol_type = other RNA
ggttagacaacttgctgtaaac

SEQ ID NO: 24392 - RNA, 22 nt, synthetic construct
  source 1..22: mol_type = other RNA
ggttaggcaacatctccctttt

SEQ ID NO: 24393 - RNA, 22 nt, synthetic construct
  source 1..22: mol_type = other RNA
ggttcatttgtatcacacagac

SEQ ID NO: 24394 - RNA, 22 nt, synthetic construct
  source 1..22: mol_type = other RNA
ggttccaccacaaattaaggct

SEQ ID NO: 24395 - RNA, 22 nt, synthetic construct
  source 1..22: mol_type = other RNA
ggttctttttggaatgctaccc

SEQ ID NO: 24396 - RNA, 22 nt, synthetic construct
  source 1..22: mol_type = other RNA
ggttgttgtcattgctgattta

SEQ ID NO: 24397 - RNA, 22 nt, synthetic construct
  source 1..22: mol_type = other RNA
ggtttacaggatgaattctgtt

SEQ ID NO: 24398 - RNA, 22 nt, synthetic construct
  source 1..22: mol_type = other RNA
ggtttcgcgagacaccaggcta

SEQ ID NO: 24399 - RNA, 22 nt, synthetic construct
  source 1..22: mol_type = other RNA
ggtttctcaagcaaaagctaaa

SEQ ID NO: 24400 - RNA, 22 nt, synthetic construct
  source 1..22: mol_type = other RNA
ggtttgacattttattaatctt

SEQ ID NO: 24401 - RNA, 22 nt, synthetic construct
  source 1..22: mol_type = other RNA
ggtttgttggacttagctttca

SEQ ID NO: 24402 - RNA, 22 nt, synthetic construct
  source 1..22: mol_type = other RNA
ggttttctctttttactgagca

SEQ ID NO: 24403 - RNA, 22 nt, synthetic construct
  source 1..22: mol_type = other RNA
gtaaaaagagaaaaccatcaat

SEQ ID NO: 24404 - RNA, 22 nt, synthetic construct
  source 1..22: mol_type = other RNA
gtaaacagtacaagccagtaat

SEQ ID NO: 24405 - RNA, 22 nt, synthetic construct
  source 1..22: mol_type = other RNA
gtaaaccaggggtgtccaatct

SEQ ID NO: 24406 - RNA, 22 nt, synthetic construct
  source 1..22: mol_type = other RNA
gtaaagcagtagtcaagatcac

SEQ ID NO: 24407 - RNA, 22 nt, synthetic construct
  source 1..22: mol_type = other RNA
gtaaatggagtgagcgacatgt

SEQ ID NO: 24408 - RNA, 22 nt, synthetic construct
  source 1..22: mol_type = other RNA
gtaacagtttaatggaatctca

SEQ ID NO: 24409 - RNA, 22 nt, synthetic construct
  source 1..22: mol_type = other RNA
gtaactgatctcagatgcctgt

SEQ ID NO: 24410 - RNA, 22 nt, synthetic construct
  source 1..22: mol_type = other RNA
gtaactgcaattcattccatgt

SEQ ID NO: 24411 - RNA, 22 nt, synthetic construct
  source 1..22: mol_type = other RNA
gtaagaacagaaatgagaggta

SEQ ID NO: 24412 - RNA, 22 nt, synthetic construct
  source 1..22: mol_type = other RNA
gtaagagtcaagccccagctca

SEQ ID NO: 24413 - RNA, 22 nt, synthetic construct
  source 1..22: mol_type = other RNA
gtaagatggatcaaaagataac

SEQ ID NO: 24414 - RNA, 22 nt, synthetic construct
  source 1..22: mol_type = other RNA
gtaaggaaataaaagctgaagc

SEQ ID NO: 24415 - RNA, 22 nt, synthetic construct
  source 1..22: mol_type = other RNA
gtaagttttatcctgaggaatt

SEQ ID NO: 24416 - RNA, 22 nt, synthetic construct
  source 1..22: mol_type = other RNA
gtaatccacagaacaagtccgg

SEQ ID NO: 24417 - RNA, 22 nt, synthetic construct
  source 1..22: mol_type = other RNA
gtaatggagtttcacctgtcat

SEQ ID NO: 24418 - RNA, 22 nt, synthetic construct
  source 1..22: mol_type = other RNA
gtaatgggccagagagcttcag

SEQ ID NO: 24419 - RNA, 22 nt, synthetic construct
  source 1..22: mol_type = other RNA
gtaattctggggttgttgtcat

SEQ ID NO: 24420 - RNA, 22 nt, synthetic construct
  source 1..22: mol_type = other RNA
gtaatttaaatcagcaatgaca

SEQ ID NO: 24421 - RNA, 22 nt, synthetic construct
  source 1..22: mol_type = other RNA
gtacaaactgctcaggagtcag

SEQ ID NO: 24422 - RNA, 22 nt, synthetic construct
  source 1..22: mol_type = other RNA
gtacaacaaatggaaaatggga

SEQ ID NO: 24423 - RNA, 22 nt, synthetic construct
  source 1..22: mol_type = other RNA
gtacaagacactattccttcaa

SEQ ID NO: 24424 - RNA, 22 nt, synthetic construct
  source 1..22: mol_type = other RNA
gtacaagccagtaatggagttt

SEQ ID NO: 24425 - RNA, 22 nt, synthetic construct
  source 1..22: mol_type = other RNA
gtactcctgagctcctagtata

SEQ ID NO: 24426 - RNA, 22 nt, synthetic construct
  source 1..22: mol_type = other RNA
gtactgcgtgggtcatagtaat

SEQ ID NO: 24427 - RNA, 22 nt, synthetic construct
  source 1..22: mol_type = other RNA
gtactgtttacagcaagttgtc

SEQ ID NO: 24428 - RNA, 22 nt, synthetic construct
  source 1..22: mol_type = other RNA
gtacttgctcctctagtattca

SEQ ID NO: 24429 - RNA, 22 nt, synthetic construct
  source 1..22: mol_type = other RNA
gtagagagcctggggagagagg

SEQ ID NO: 24430 - RNA, 22 nt, synthetic construct
  source 1..22: mol_type = other RNA
gtagcatcaggttaaatcttaa

SEQ ID NO: 24431 - RNA, 22 nt, synthetic construct
  source 1..22: mol_type = other RNA
gtagcattccaaaaagaaccac

SEQ ID NO: 24432 - RNA, 22 nt, synthetic construct
  source 1..22: mol_type = other RNA
gtagccccggacttgttctgtg

SEQ ID NO: 24433 - RNA, 22 nt, synthetic construct
  source 1..22: mol_type = other RNA
gtagcctggtgtctcgcgaaac

SEQ ID NO: 24434 - RNA, 22 nt, synthetic construct
  source 1..22: mol_type = other RNA
gtagctcctgtaacagtttaat

SEQ ID NO: 24435 - RNA, 22 nt, synthetic construct
  source 1..22: mol_type = other RNA
gtaggacagaaatttaggctgg

SEQ ID NO: 24436 - RNA, 22 nt, synthetic construct
  source 1..22: mol_type = other RNA
gtagggatgcaaaggggtagag

SEQ ID NO: 24437 - RNA, 22 nt, synthetic construct
  source 1..22: mol_type = other RNA
gtagtatgtggaaaatagtgaa

SEQ ID NO: 24438 - RNA, 22 nt, synthetic construct
  source 1..22: mol_type = other RNA
gtagtcaagatcacctggactg

SEQ ID NO: 24439 - RNA, 22 nt, synthetic construct
  source 1..22: mol_type = other RNA
gtataaaactcaggtgatcatg

SEQ ID NO: 24440 - RNA, 22 nt, synthetic construct
  source 1..22: mol_type = other RNA
gtatactaggagctcaggagta

SEQ ID NO: 24441 - RNA, 22 nt, synthetic construct
  source 1..22: mol_type = other RNA
gtatactctgatgtctagccaa

SEQ ID NO: 24442 - RNA, 22 nt, synthetic construct
  source 1..22: mol_type = other RNA
gtatagctgtagccccggactt

SEQ ID NO: 24443 - RNA, 22 nt, synthetic construct
  source 1..22: mol_type = other RNA
gtatcacacagacctattcttc

SEQ ID NO: 24444 - RNA, 22 nt, synthetic construct
  source 1..22: mol_type = other RNA
gtatgagtgagagttgctaaga

SEQ ID NO: 24445 - RNA, 22 nt, synthetic construct
  source 1..22: mol_type = other RNA
gtatgtggaaaatagtgaaaaa

SEQ ID NO: 24446 - RNA, 22 nt, synthetic construct
  source 1..22: mol_type = other RNA
gtattagcaatataaaaagcat

SEQ ID NO: 24447 - RNA, 22 nt, synthetic construct
  source 1..22: mol_type = other RNA
gtattataattcctcaggataa

SEQ ID NO: 24448 - RNA, 22 nt, synthetic construct
  source 1..22: mol_type = other RNA
gtattcagacatagcactagct

SEQ ID NO: 24449 - RNA, 22 nt, synthetic construct
  source 1..22: mol_type = other RNA
gtattctgtaatccacagaaca

SEQ ID NO: 24450 - RNA, 22 nt, synthetic construct
  source 1..22: mol_type = other RNA
gtatttagaggaagaaaaaggg

SEQ ID NO: 24451 - RNA, 22 nt, synthetic construct
  source 1..22: mol_type = other RNA
gtcaaaccataaagacatttac

SEQ ID NO: 24452 - RNA, 22 nt, synthetic construct
  source 1..22: mol_type = other RNA
gtcaagatcacctggactgtga

SEQ ID NO: 24453 - RNA, 22 nt, synthetic construct
  source 1..22: mol_type = other RNA
gtcaagccccagctcaagcctt

SEQ ID NO: 24454 - RNA, 22 nt, synthetic construct
  source 1..22: mol_type = other RNA
gtcacatggaatgaattgcagt

SEQ ID NO: 24455 - RNA, 22 nt, synthetic construct
  source 1..22: mol_type = other RNA
gtcagaagaaaactgctttttt

SEQ ID NO: 24456 - RNA, 22 nt, synthetic construct
  source 1..22: mol_type = other RNA
gtcagggacagaatcccagcta

SEQ ID NO: 24457 - RNA, 22 nt, synthetic construct
  source 1..22: mol_type = other RNA
gtcataccagccacttttccaa

SEQ ID NO: 24458 - RNA, 22 nt, synthetic construct
  source 1..22: mol_type = other RNA
gtcatagaacaacagaccatgg

SEQ ID NO: 24459 - RNA, 22 nt, synthetic construct
  source 1..22: mol_type = other RNA
gtcatagtaattctggggttgt

SEQ ID NO: 24460 - RNA, 22 nt, synthetic construct
  source 1..22: mol_type = other RNA
gtcatatatctttgtggggtgg

SEQ ID NO: 24461 - RNA, 22 nt, synthetic construct
  source 1..22: mol_type = other RNA
gtcatatttgtgtgtgtagtat

SEQ ID NO: 24462 - RNA, 22 nt, synthetic construct
  source 1..22: mol_type = other RNA
gtcatctcccctttggtcatgc

SEQ ID NO: 24463 - RNA, 22 nt, synthetic construct
  source 1..22: mol_type = other RNA
gtcatgccttccatggtctgtt

SEQ ID NO: 24464 - RNA, 22 nt, synthetic construct
  source 1..22: mol_type = other RNA
gtcattgctgatttaaattacc

SEQ ID NO: 24465 - RNA, 22 nt, synthetic construct
  source 1..22: mol_type = other RNA
gtcattttcatgctctatcttc

SEQ ID NO: 24466 - RNA, 22 nt, synthetic construct
  source 1..22: mol_type = other RNA
gtccaacaaaccatttttaaag

SEQ ID NO: 24467 - RNA, 22 nt, synthetic construct
  source 1..22: mol_type = other RNA
gtccaaggcaggcacatcttta

SEQ ID NO: 24468 - RNA, 22 nt, synthetic construct
  source 1..22: mol_type = other RNA
gtccacagttgcaattcaaatt

SEQ ID NO: 24469 - RNA, 22 nt, synthetic construct
  source 1..22: mol_type = other RNA
gtccacgtattctgtaatccac

SEQ ID NO: 24470 - RNA, 22 nt, synthetic construct
  source 1..22: mol_type = other RNA
gtccaggtgatcttgactactg

SEQ ID NO: 24471 - RNA, 22 nt, synthetic construct
  source 1..22: mol_type = other RNA
gtcccatgcggcccgcgggtta

SEQ ID NO: 24472 - RNA, 22 nt, synthetic construct
  source 1..22: mol_type = other RNA
gtccctgaccgtcttcacagtc

SEQ ID NO: 24473 - RNA, 22 nt, synthetic construct
  source 1..22: mol_type = other RNA
gtccctggatagactttcctca

SEQ ID NO: 24474 - RNA, 22 nt, synthetic construct
  source 1..22: mol_type = other RNA
gtccggggctacagctatactg

SEQ ID NO: 24475 - RNA, 22 nt, synthetic construct
  source 1..22: mol_type = other RNA
gtcctaaaggaagatagagcat

SEQ ID NO: 24476 - RNA, 22 nt, synthetic construct
  source 1..22: mol_type = other RNA
gtcctacaagttttcacttcct

SEQ ID NO: 24477 - RNA, 22 nt, synthetic construct
  source 1..22: mol_type = other RNA
gtcctgggtcccatgcggcccg

SEQ ID NO: 24478 - RNA, 22 nt, synthetic construct
  source 1..22: mol_type = other RNA
gtcctttatatgtggcccaaga

SEQ ID NO: 24479 - RNA, 22 nt, synthetic construct
  source 1..22: mol_type = other RNA
gtcgcattcaaagctgtcctgg

SEQ ID NO: 24480 - RNA, 22 nt, synthetic construct
  source 1..22: mol_type = other RNA
gtcgctcactccatttacttaa

SEQ ID NO: 24481 - RNA, 22 nt, synthetic construct
  source 1..22: mol_type = other RNA
gtctaacccgcgggccgcatgg

SEQ ID NO: 24482 - RNA, 22 nt, synthetic construct
  source 1..22: mol_type = other RNA
gtctagccaactttaagtaaat

SEQ ID NO: 24483 - RNA, 22 nt, synthetic construct
  source 1..22: mol_type = other RNA
gtctatccagggaccttatgca

SEQ ID NO: 24484 - RNA, 22 nt, synthetic construct
  source 1..22: mol_type = other RNA
gtctcaaatggtataaaactca

SEQ ID NO: 24485 - RNA, 22 nt, synthetic construct
  source 1..22: mol_type = other RNA
gtctcgcgaaaccagacagatt

SEQ ID NO: 24486 - RNA, 22 nt, synthetic construct
  source 1..22: mol_type = other RNA
gtctctagaaaaatgctccaaa

SEQ ID NO: 24487 - RNA, 22 nt, synthetic construct
  source 1..22: mol_type = other RNA
gtctctatgatttgggtaactg

SEQ ID NO: 24488 - RNA, 22 nt, synthetic construct
  source 1..22: mol_type = other RNA
gtctctgtctttagtgttatct

SEQ ID NO: 24489 - RNA, 22 nt, synthetic construct
  source 1..22: mol_type = other RNA
gtctgaatactagaggagcaag

SEQ ID NO: 24490 - RNA, 22 nt, synthetic construct
  source 1..22: mol_type = other RNA
gtctggtttcgcgagacaccag

SEQ ID NO: 24491 - RNA, 22 nt, synthetic construct
  source 1..22: mol_type = other RNA
gtctgtctctagaaaaatgctc

SEQ ID NO: 24492 - RNA, 22 nt, synthetic construct
  source 1..22: mol_type = other RNA
gtctgtgtgatacaaatgaacc

SEQ ID NO: 24493 - RNA, 22 nt, synthetic construct
  source 1..22: mol_type = other RNA
gtctgttgttctatgacccaaa

SEQ ID NO: 24494 - RNA, 22 nt, synthetic construct
  source 1..22: mol_type = other RNA
gtcttcacagtccaggtgatct

SEQ ID NO: 24495 - RNA, 22 nt, synthetic construct
  source 1..22: mol_type = other RNA
gtcttgggccacatataaagga

SEQ ID NO: 24496 - RNA, 22 nt, synthetic construct
  source 1..22: mol_type = other RNA
gtcttgtactcctgagctccta

SEQ ID NO: 24497 - RNA, 22 nt, synthetic construct
  source 1..22: mol_type = other RNA
gtctttagtgttatcttttgat

SEQ ID NO: 24498 - RNA, 22 nt, synthetic construct
  source 1..22: mol_type = other RNA
gtgaaaaatgaaaaagctgtta

SEQ ID NO: 24499 - RNA, 22 nt, synthetic construct
  source 1..22: mol_type = other RNA
gtgaaaacttgtaggacagaaa

SEQ ID NO: 24500 - RNA, 22 nt, synthetic construct
  source 1..22: mol_type = other RNA
gtgaaactccattactggcttg

SEQ ID NO: 24501 - RNA, 22 nt, synthetic construct
  source 1..22: mol_type = other RNA
gtgaaagcaagcgttaatgagt

SEQ ID NO: 24502 - RNA, 22 nt, synthetic construct
  source 1..22: mol_type = other RNA
gtgaactagggaggaataaaag

SEQ ID NO: 24503 - RNA, 22 nt, synthetic construct
  source 1..22: mol_type = other RNA
gtgaagacggtcagggacagaa

SEQ ID NO: 24504 - RNA, 22 nt, synthetic construct
  source 1..22: mol_type = other RNA
gtgaatgtgatgcataaggtcc

SEQ ID NO: 24505 - RNA, 22 nt, synthetic construct
  source 1..22: mol_type = other RNA
gtgacttcaggagagaggtcat

SEQ ID NO: 24506 - RNA, 22 nt, synthetic construct
  source 1..22: mol_type = other RNA
gtgagagttgctaagatgcctg

SEQ ID NO: 24507 - RNA, 22 nt, synthetic construct
  source 1..22: mol_type = other RNA
gtgagattccattaaactgtta

SEQ ID NO: 24508 - RNA, 22 nt, synthetic construct
  source 1..22: mol_type = other RNA
gtgagcgacatgtaaatgtctt

SEQ ID NO: 24509 - RNA, 22 nt, synthetic construct
  source 1..22: mol_type = other RNA
gtgagggagggaagcactggtt

SEQ ID NO: 24510 - RNA, 22 nt, synthetic construct
  source 1..22: mol_type = other RNA
gtgatacaaatgaacccagcct

SEQ ID NO: 24511 - RNA, 22 nt, synthetic construct
  source 1..22: mol_type = other RNA
gtgatagcttccaaattgctgt

SEQ ID NO: 24512 - RNA, 22 nt, synthetic construct
  source 1..22: mol_type = other RNA
gtgatcatgctttatgtctgtc

SEQ ID NO: 24513 - RNA, 22 nt, synthetic construct
  source 1..22: mol_type = other RNA
gtgatcttgactactgctttac

SEQ ID NO: 24514 - RNA, 22 nt, synthetic construct
  source 1..22: mol_type = other RNA
gtgatgcataaggtccctggat

SEQ ID NO: 24515 - RNA, 22 nt, synthetic construct
  source 1..22: mol_type = other RNA
gtgattgttttctataactcaa

SEQ ID NO: 24516 - RNA, 22 nt, synthetic construct
  source 1..22: mol_type = other RNA
gtgcagcaagggtctcaaatgg

SEQ ID NO: 24517 - RNA, 22 nt, synthetic construct
  source 1..22: mol_type = other RNA
gtgcctgccttggacaacagtg

SEQ ID NO: 24518 - RNA, 22 nt, synthetic construct
  source 1..22: mol_type = other RNA
gtgctatgtctgaatactagag

SEQ ID NO: 24519 - RNA, 22 nt, synthetic construct
  source 1..22: mol_type = other RNA
gtgcttccctccctcaccctct

SEQ ID NO: 24520 - RNA, 22 nt, synthetic construct
  source 1..22: mol_type = other RNA
gtgcttttattcctccctagtt

SEQ ID NO: 24521 - RNA, 22 nt, synthetic construct
  source 1..22: mol_type = other RNA
gtggaaaatagtgaaaaatgaa

SEQ ID NO: 24522 - RNA, 22 nt, synthetic construct
  source 1..22: mol_type = other RNA
gtggaaccaatctgtctggttt

SEQ ID NO: 24523 - RNA, 22 nt, synthetic construct
  source 1..22: mol_type = other RNA
gtggacagtatagctgtagccc

SEQ ID NO: 24524 - RNA, 22 nt, synthetic construct
  source 1..22: mol_type = other RNA
gtggacattgatggttttctct

SEQ ID NO: 24525 - RNA, 22 nt, synthetic construct
  source 1..22: mol_type = other RNA
gtggattacagaatacgtggac

SEQ ID NO: 24526 - RNA, 22 nt, synthetic construct
  source 1..22: mol_type = other RNA
gtggcccaagacagttcttgca

SEQ ID NO: 24527 - RNA, 22 nt, synthetic construct
  source 1..22: mol_type = other RNA
gtggctggtatgactaaagaac

SEQ ID NO: 24528 - RNA, 22 nt, synthetic construct
  source 1..22: mol_type = other RNA
gtggggtggttctttttggaat

SEQ ID NO: 24529 - RNA, 22 nt, synthetic construct
  source 1..22: mol_type = other RNA
gtgggtcatagtaattctgggg

SEQ ID NO: 24530 - RNA, 22 nt, synthetic construct
  source 1..22: mol_type = other RNA
gtggtgcagcaagggtctcaaa

SEQ ID NO: 24531 - RNA, 22 nt, synthetic construct
  source 1..22: mol_type = other RNA
gtggtggaaccaatctgtctgg

SEQ ID NO: 24532 - RNA, 22 nt, synthetic construct
  source 1..22: mol_type = other RNA
gtggttctttttggaatgctac

SEQ ID NO: 24533 - RNA, 22 nt, synthetic construct
  source 1..22: mol_type = other RNA
gtgtagcatcaggttaaatctt

SEQ ID NO: 24534 - RNA, 22 nt, synthetic construct
  source 1..22: mol_type = other RNA
gtgtagtatgtggaaaatagtg

SEQ ID NO: 24535 - RNA, 22 nt, synthetic construct
  source 1..22: mol_type = other RNA
gtgtctcgcgaaaccagacaga

SEQ ID NO: 24536 - RNA, 22 nt, synthetic construct
  source 1..22: mol_type = other RNA
gtgtcttgtactcctgagctcc

SEQ ID NO: 24537 - RNA, 22 nt, synthetic construct
  source 1..22: mol_type = other RNA
gtgtgatacaaatgaacccagc

SEQ ID NO: 24538 - RNA, 22 nt, synthetic construct
  source 1..22: mol_type = other RNA
gtgtgatagcttccaaattgct

SEQ ID NO: 24539 - RNA, 22 nt, synthetic construct
  source 1..22: mol_type = other RNA
gtgtgtagtatgtggaaaatag

SEQ ID NO: 24540 - RNA, 22 nt, synthetic construct
  source 1..22: mol_type = other RNA
gtgtgtgtagtatgtggaaaat

SEQ ID NO: 24541 - RNA, 22 nt, synthetic construct
  source 1..22: mol_type = other RNA
gtgttaaaatgttggtattata

SEQ ID NO: 24542 - RNA, 22 nt, synthetic construct
  source 1..22: mol_type = other RNA
gtgttatcttttgatccatctt

SEQ ID NO: 24543 - RNA, 22 nt, synthetic construct
  source 1..22: mol_type = other RNA
gtgtttccaggaagtgaaaact

SEQ ID NO: 24544 - RNA, 22 nt, synthetic construct
  source 1..22: mol_type = other RNA
gttaaaatgttggtattataat

SEQ ID NO: 24545 - RNA, 22 nt, synthetic construct
  source 1..22: mol_type = other RNA
gttaaatgaaatgtaatgggcc

SEQ ID NO: 24546 - RNA, 22 nt, synthetic construct
  source 1..22: mol_type = other RNA
gttaaattgaggaaagtctatc

SEQ ID NO: 24547 - RNA, 22 nt, synthetic construct
  source 1..22: mol_type = other RNA
gttaaggtaatttaaatcagca

SEQ ID NO: 24548 - RNA, 22 nt, synthetic construct
  source 1..22: mol_type = other RNA
gttacaggagctacatagttaa

SEQ ID NO: 24549 - RNA, 22 nt, synthetic construct
  source 1..22: mol_type = other RNA
gttacccaaatcatagagacgt

SEQ ID NO: 24550 - RNA, 22 nt, synthetic construct
  source 1..22: mol_type = other RNA
gttactaactggtaagaacaga

SEQ ID NO: 24551 - RNA, 22 nt, synthetic construct
  source 1..22: mol_type = other RNA
gttagacaacttgctgtaaaca

SEQ ID NO: 24552 - RNA, 22 nt, synthetic construct
  source 1..22: mol_type = other RNA
gttaggatgattgtcctaaagg

SEQ ID NO: 24553 - RNA, 22 nt, synthetic construct
  source 1..22: mol_type = other RNA
gttaggcaacatctcccttttt

SEQ ID NO: 24554 - RNA, 22 nt, synthetic construct
  source 1..22: mol_type = other RNA
gttagtaactgatctcagatgc

SEQ ID NO: 24555 - RNA, 22 nt, synthetic construct
  source 1..22: mol_type = other RNA
gttatcttttgatccatcttac

SEQ ID NO: 24556 - RNA, 22 nt, synthetic construct
  source 1..22: mol_type = other RNA
gttcacgttcttaaatgtttat

SEQ ID NO: 24557 - RNA, 22 nt, synthetic construct
  source 1..22: mol_type = other RNA
gttcatttgtatcacacagacc

SEQ ID NO: 24558 - RNA, 22 nt, synthetic construct
  source 1..22: mol_type = other RNA
gttccaccacaaattaaggctt

SEQ ID NO: 24559 - RNA, 22 nt, synthetic construct
  source 1..22: mol_type = other RNA
gttctatgacccaaactgccct

SEQ ID NO: 24560 - RNA, 22 nt, synthetic construct
  source 1..22: mol_type = other RNA
gttctcgtgaatgtgatgcata

SEQ ID NO: 24561 - RNA, 22 nt, synthetic construct
  source 1..22: mol_type = other RNA
gttctgatatatttaactatgt

SEQ ID NO: 24562 - RNA, 22 nt, synthetic construct
  source 1..22: mol_type = other RNA
gttctgtggattacagaatacg

SEQ ID NO: 24563 - RNA, 22 nt, synthetic construct
  source 1..22: mol_type = other RNA
gttcttaccagttagtaactga

SEQ ID NO: 24564 - RNA, 22 nt, synthetic construct
  source 1..22: mol_type = other RNA
gttcttgcagtgtggcccaggg

SEQ ID NO: 24565 - RNA, 22 nt, synthetic construct
  source 1..22: mol_type = other RNA
gttctttagtcataccagccac

SEQ ID NO: 24566 - RNA, 22 nt, synthetic construct
  source 1..22: mol_type = other RNA
gttctttttggaatgctaccct

SEQ ID NO: 24567 - RNA, 22 nt, synthetic construct
  source 1..22: mol_type = other RNA
gttgcctaacctcagatccaat

SEQ ID NO: 24568 - RNA, 22 nt, synthetic construct
  source 1..22: mol_type = other RNA
gttgctaagatgcctggtaggg

SEQ ID NO: 24569 - RNA, 22 nt, synthetic construct
  source 1..22: mol_type = other RNA
gttggacttagctttcagctaa

SEQ ID NO: 24570 - RNA, 22 nt, synthetic construct
  source 1..22: mol_type = other RNA
gttggctagacatcagagtata

SEQ ID NO: 24571 - RNA, 22 nt, synthetic construct
  source 1..22: mol_type = other RNA
gttgggtcgcattcaaagctgt

SEQ ID NO: 24572 - RNA, 22 nt, synthetic construct
  source 1..22: mol_type = other RNA
gttggtattataattcctcagg

SEQ ID NO: 24573 - RNA, 22 nt, synthetic construct
  source 1..22: mol_type = other RNA
gttgtacttgctcctctagtat

SEQ ID NO: 24574 - RNA, 22 nt, synthetic construct
  source 1..22: mol_type = other RNA
gttgtcattgctgatttaaatt

SEQ ID NO: 24575 - RNA, 22 nt, synthetic construct
  source 1..22: mol_type = other RNA
gttgtccaaggcaggcacatct

SEQ ID NO: 24576 - RNA, 22 nt, synthetic construct
  source 1..22: mol_type = other RNA
gttgtctaacccgcgggccgca

SEQ ID NO: 24577 - RNA, 22 nt, synthetic construct
  source 1..22: mol_type = other RNA
gttgttctatgacccaaactgc

SEQ ID NO: 24578 - RNA, 22 nt, synthetic construct
  source 1..22: mol_type = other RNA
gttgttgtcattgctgatttaa

SEQ ID NO: 24579 - RNA, 22 nt, synthetic construct
  source 1..22: mol_type = other RNA
gtttaatggaatctcacctccc

SEQ ID NO: 24580 - RNA, 22 nt, synthetic construct
  source 1..22: mol_type = other RNA
gtttacagcaagttgtctaacc

SEQ ID NO: 24581 - RNA, 22 nt, synthetic construct
  source 1..22: mol_type = other RNA
gtttacaggatgaattctgttc

SEQ ID NO: 24582 - RNA, 22 nt, synthetic construct
  source 1..22: mol_type = other RNA
gtttcacctgtcattttcatgc

SEQ ID NO: 24583 - RNA, 22 nt, synthetic construct
  source 1..22: mol_type = other RNA
gtttccaggaagtgaaaacttg

SEQ ID NO: 24584 - RNA, 22 nt, synthetic construct
  source 1..22: mol_type = other RNA
gtttcgcgagacaccaggctac

SEQ ID NO: 24585 - RNA, 22 nt, synthetic construct
  source 1..22: mol_type = other RNA
gtttctcaagcaaaagctaaaa

SEQ ID NO: 24586 - RNA, 22 nt, synthetic construct
  source 1..22: mol_type = other RNA
gtttgacattttattaatcttg

SEQ ID NO: 24587 - RNA, 22 nt, synthetic construct
  source 1..22: mol_type = other RNA
gtttgggtcatagaacaacaga

SEQ ID NO: 24588 - RNA, 22 nt, synthetic construct
  source 1..22: mol_type = other RNA
gtttgtactgcgtgggtcatag

SEQ ID NO: 24589 - RNA, 22 nt, synthetic construct
  source 1..22: mol_type = other RNA
gtttgttggacttagctttcag

SEQ ID NO: 24590 - RNA, 22 nt, synthetic construct
  source 1..22: mol_type = other RNA
gttttataccatttgagaccct

SEQ ID NO: 24591 - RNA, 22 nt, synthetic construct
  source 1..22: mol_type = other RNA
gttttatcctgaggaattataa

SEQ ID NO: 24592 - RNA, 22 nt, synthetic construct
  source 1..22: mol_type = other RNA
gttttcacttcctggaaacact

SEQ ID NO: 24593 - RNA, 22 nt, synthetic construct
  source 1..22: mol_type = other RNA
gttttctataactcaagatatg

SEQ ID NO: 24594 - RNA, 22 nt, synthetic construct
  source 1..22: mol_type = other RNA
gttttctctttttactgagcag

SEQ ID NO: 24595 - RNA, 22 nt, synthetic construct
  source 1..22: mol_type = other RNA
gttttcttctgactcctgagca

SEQ ID NO: 24596 - RNA, 22 nt, synthetic construct
  source 1..22: mol_type = other RNA
taaaaaagcagttttcttctga

SEQ ID NO: 24597 - RNA, 22 nt, synthetic construct
  source 1..22: mol_type = other RNA
taaaaagagaaaaccatcaatg

SEQ ID NO: 24598 - RNA, 22 nt, synthetic construct
  source 1..22: mol_type = other RNA
taaaaagcatttggtgttaaaa

SEQ ID NO: 24599 - RNA, 22 nt, synthetic construct
  source 1..22: mol_type = other RNA
taaaaatggtttgttggactta

SEQ ID NO: 24600 - RNA, 22 nt, synthetic construct
  source 1..22: mol_type = other RNA
taaaaattcagttctttagtca

SEQ ID NO: 24601 - RNA, 22 nt, synthetic construct
  source 1..22: mol_type = other RNA
taaaactcaggtgatcatgctt

SEQ ID NO: 24602 - RNA, 22 nt, synthetic construct
  source 1..22: mol_type = other RNA
taaaagcactgctgggtaagag

SEQ ID NO: 24603 - RNA, 22 nt, synthetic construct
  source 1..22: mol_type = other RNA
taaaagcagcaagggtagcatt

SEQ ID NO: 24604 - RNA, 22 nt, synthetic construct
  source 1..22: mol_type = other RNA
taaaagctgaagctctctggcc

SEQ ID NO: 24605 - RNA, 22 nt, synthetic construct
  source 1..22: mol_type = other RNA
taaaagggcagtttgggtcata

SEQ ID NO: 24606 - RNA, 22 nt, synthetic construct
  source 1..22: mol_type = other RNA
taaaatgttggtattataattc

SEQ ID NO: 24607 - RNA, 22 nt, synthetic construct
  source 1..22: mol_type = other RNA
taaacagtacaagccagtaatg

SEQ ID NO: 24608 - RNA, 22 nt, synthetic construct
  source 1..22: mol_type = other RNA
taaacatttaagaacgtgaact

SEQ ID NO: 24609 - RNA, 22 nt, synthetic construct
  source 1..22: mol_type = other RNA
taaaccaggggtgtccaatctt

SEQ ID NO: 24610 - RNA, 22 nt, synthetic construct
  source 1..22: mol_type = other RNA
taaactgttacaggagctacat

SEQ ID NO: 24611 - RNA, 22 nt, synthetic construct
  source 1..22: mol_type = other RNA
taaagacagagacagcaatttg

SEQ ID NO: 24612 - RNA, 22 nt, synthetic construct
  source 1..22: mol_type = other RNA
taaagacatttacatgtcgctc

SEQ ID NO: 24613 - RNA, 22 nt, synthetic construct
  source 1..22: mol_type = other RNA
taaagatgtgcctgccttggac

SEQ ID NO: 24614 - RNA, 22 nt, synthetic construct
  source 1..22: mol_type = other RNA
taaagcagtagtcaagatcacc

SEQ ID NO: 24615 - RNA, 22 nt, synthetic construct
  source 1..22: mol_type = other RNA
taaagcatgatcacctgagttt

SEQ ID NO: 24616 - RNA, 22 nt, synthetic construct
  source 1..22: mol_type = other RNA
taaaggaagatagagcatgaaa

SEQ ID NO: 24617 - RNA, 22 nt, synthetic construct
  source 1..22: mol_type = other RNA
taaagttggctagacatcagag

SEQ ID NO: 24618 - RNA, 22 nt, synthetic construct
  source 1..22: mol_type = other RNA
taaatacctctcatttctgttc

SEQ ID NO: 24619 - RNA, 22 nt, synthetic construct
  source 1..22: mol_type = other RNA
taaatcagcaatgacaacaacc

SEQ ID NO: 24620 - RNA, 22 nt, synthetic construct
  source 1..22: mol_type = other RNA
taaatgaaatgtaatgggccag

SEQ ID NO: 24621 - RNA, 22 nt, synthetic construct
  source 1..22: mol_type = other RNA
taaatggagtgagcgacatgta

SEQ ID NO: 24622 - RNA, 22 nt, synthetic construct
  source 1..22: mol_type = other RNA
taaattaccttaactattctga

SEQ ID NO: 24623 - RNA, 22 nt, synthetic construct
  source 1..22: mol_type = other RNA
taaattgaggaaagtctatcca

SEQ ID NO: 24624 - RNA, 22 nt, synthetic construct
  source 1..22: mol_type = other RNA
taaatttctgtcctacaagttt

SEQ ID NO: 24625 - RNA, 22 nt, synthetic construct
  source 1..22: mol_type = other RNA
taacaagatgtaagatggatca

SEQ ID NO: 24626 - RNA, 22 nt, synthetic construct
  source 1..22: mol_type = other RNA
taacactaaagacagagacagc

SEQ ID NO: 24627 - RNA, 22 nt, synthetic construct
  source 1..22: mol_type = other RNA
taacagctttttcatttttcac

SEQ ID NO: 24628 - RNA, 22 nt, synthetic construct
  source 1..22: mol_type = other RNA
taacagtttaatggaatctcac

SEQ ID NO: 24629 - RNA, 22 nt, synthetic construct
  source 1..22: mol_type = other RNA
taacccgcgggccgcatgggac

SEQ ID NO: 24630 - RNA, 22 nt, synthetic construct
  source 1..22: mol_type = other RNA
taacctcagatccaattctctg

SEQ ID NO: 24631 - RNA, 22 nt, synthetic construct
  source 1..22: mol_type = other RNA
taacctgatgctacactttggt

SEQ ID NO: 24632 - RNA, 22 nt, synthetic construct
  source 1..22: mol_type = other RNA
taacgcttgctttcactgttgt

SEQ ID NO: 24633 - RNA, 22 nt, synthetic construct
  source 1..22: mol_type = other RNA
taactatgtagctcctgtaaca

SEQ ID NO: 24634 - RNA, 22 nt, synthetic construct
  source 1..22: mol_type = other RNA
taactattctgagctttttgaa

SEQ ID NO: 24635 - RNA, 22 nt, synthetic construct
  source 1..22: mol_type = other RNA
taactcaagatatgatgcttag

SEQ ID NO: 24636 - RNA, 22 nt, synthetic construct
  source 1..22: mol_type = other RNA
taactgatctcagatgcctgtg

SEQ ID NO: 24637 - RNA, 22 nt, synthetic construct
  source 1..22: mol_type = other RNA
taactgcaattcattccatgtg

SEQ ID NO: 24638 - RNA, 22 nt, synthetic construct
  source 1..22: mol_type = other RNA
taactggtaagaacagaaatga

SEQ ID NO: 24639 - RNA, 22 nt, synthetic construct
  source 1..22: mol_type = other RNA
taagaacagaaatgagaggtat

SEQ ID NO: 24640 - RNA, 22 nt, synthetic construct
  source 1..22: mol_type = other RNA
taagaacgtgaactagggagga

SEQ ID NO: 24641 - RNA, 22 nt, synthetic construct
  source 1..22: mol_type = other RNA
taagagtcaagccccagctcaa

SEQ ID NO: 24642 - RNA, 22 nt, synthetic construct
  source 1..22: mol_type = other RNA
taagatgcctggtagggatgca

SEQ ID NO: 24643 - RNA, 22 nt, synthetic construct
  source 1..22: mol_type = other RNA
taagatggatcaaaagataaca

SEQ ID NO: 24644 - RNA, 22 nt, synthetic construct
  source 1..22: mol_type = other RNA
taagatttaacctgatgctaca

SEQ ID NO: 24645 - RNA, 22 nt, synthetic construct
  source 1..22: mol_type = other RNA
taagcatcatatcttgagttat

SEQ ID NO: 24646 - RNA, 22 nt, synthetic construct
  source 1..22: mol_type = other RNA
taaggaaataaaagctgaagct

SEQ ID NO: 24647 - RNA, 22 nt, synthetic construct
  source 1..22: mol_type = other RNA
taaggcttgagctggggcttga

SEQ ID NO: 24648 - RNA, 22 nt, synthetic construct
  source 1..22: mol_type = other RNA
taaggtaatttaaatcagcaat

SEQ ID NO: 24649 - RNA, 22 nt, synthetic construct
  source 1..22: mol_type = other RNA
taaggtccctggatagactttc

SEQ ID NO: 24650 - RNA, 22 nt, synthetic construct
  source 1..22: mol_type = other RNA
taagtaaatggagtgagcgaca

SEQ ID NO: 24651 - RNA, 22 nt, synthetic construct
  source 1..22: mol_type = other RNA
taagtagtgataatccgcagtc

SEQ ID NO: 24652 - RNA, 22 nt, synthetic construct
  source 1..22: mol_type = other RNA
taagtccaacaaaccattttta

SEQ ID NO: 24653 - RNA, 22 nt, synthetic construct
  source 1..22: mol_type = other RNA
taagttttatcctgaggaatta

SEQ ID NO: 24654 - RNA, 22 nt, synthetic construct
  source 1..22: mol_type = other RNA
taataccaacattttaacacca

SEQ ID NO: 24655 - RNA, 22 nt, synthetic construct
  source 1..22: mol_type = other RNA
taatccacagaacaagtccggg

SEQ ID NO: 24656 - RNA, 22 nt, synthetic construct
  source 1..22: mol_type = other RNA
taatcctgcagattcaaatgtc

SEQ ID NO: 24657 - RNA, 22 nt, synthetic construct
  source 1..22: mol_type = other RNA
taatcttgagcattggaaaagt

SEQ ID NO: 24658 - RNA, 22 nt, synthetic construct
  source 1..22: mol_type = other RNA
taatgaattttagggaggtgag

SEQ ID NO: 24659 - RNA, 22 nt, synthetic construct
  source 1..22: mol_type = other RNA
taatggaatctcacctccctaa

SEQ ID NO: 24660 - RNA, 22 nt, synthetic construct
  source 1..22: mol_type = other RNA
taatggagtttcacctgtcatt

SEQ ID NO: 24661 - RNA, 22 nt, synthetic construct
  source 1..22: mol_type = other RNA
taatgggccagagagcttcagc

SEQ ID NO: 24662 - RNA, 22 nt, synthetic construct
  source 1..22: mol_type = other RNA
taattcctcaggataaaactta

SEQ ID NO: 24663 - RNA, 22 nt, synthetic construct
  source 1..22: mol_type = other RNA
taattctggggttgttgtcatt

SEQ ID NO: 24664 - RNA, 22 nt, synthetic construct
  source 1..22: mol_type = other RNA
taatttaaatcagcaatgacaa

SEQ ID NO: 24665 - RNA, 22 nt, synthetic construct
  source 1..22: mol_type = other RNA
taatttgaattgcaactgtgga

SEQ ID NO: 24666 - RNA, 22 nt, synthetic construct
  source 1..22: mol_type = other RNA
taatttgtggtggaaccaatct

SEQ ID NO: 24667 - RNA, 22 nt, synthetic construct
  source 1..22: mol_type = other RNA
tacaaactgctcaggagtcaga

SEQ ID NO: 24668 - RNA, 22 nt, synthetic construct
  source 1..22: mol_type = other RNA
tacaaatgaacccagcctaaat

SEQ ID NO: 24669 - RNA, 22 nt, synthetic construct
  source 1..22: mol_type = other RNA
tacaacaaatggaaaatgggat

SEQ ID NO: 24670 - RNA, 22 nt, synthetic construct
  source 1..22: mol_type = other RNA
tacaagacactattccttcaaa

SEQ ID NO: 24671 - RNA, 22 nt, synthetic construct
  source 1..22: mol_type = other RNA
tacaagccagtaatggagtttc

SEQ ID NO: 24672 - RNA, 22 nt, synthetic construct
  source 1..22: mol_type = other RNA
tacaagttttcacttcctggaa

SEQ ID NO: 24673 - RNA, 22 nt, synthetic construct
  source 1..22: mol_type = other RNA
tacacacacaaatatgacctct

SEQ ID NO: 24674 - RNA, 22 nt, synthetic construct
  source 1..22: mol_type = other RNA
tacactttggtggtgcagcaag

SEQ ID NO: 24675 - RNA, 22 nt, synthetic construct
  source 1..22: mol_type = other RNA
tacagaatacgtggacattgat

SEQ ID NO: 24676 - RNA, 22 nt, synthetic construct
  source 1..22: mol_type = other RNA
tacagagaattggatctgaggt

SEQ ID NO: 24677 - RNA, 22 nt, synthetic construct
  source 1..22: mol_type = other RNA
tacagcaagttgtctaacccgc

SEQ ID NO: 24678 - RNA, 22 nt, synthetic construct
  source 1..22: mol_type = other RNA
tacagctatactgtccacagtt

SEQ ID NO: 24679 - RNA, 22 nt, synthetic construct
  source 1..22: mol_type = other RNA
tacaggagctacatagttaaat

SEQ ID NO: 24680 - RNA, 22 nt, synthetic construct
  source 1..22: mol_type = other RNA
tacaggatgaattctgttctcg

SEQ ID NO: 24681 - RNA, 22 nt, synthetic construct
  source 1..22: mol_type = other RNA
tacatcttgttaggatgattgt

SEQ ID NO: 24682 - RNA, 22 nt, synthetic construct
  source 1..22: mol_type = other RNA
tacatgtcgctcactccattta

SEQ ID NO: 24683 - RNA, 22 nt, synthetic construct
  source 1..22: mol_type = other RNA
taccaacattttaacaccaaat

SEQ ID NO: 24684 - RNA, 22 nt, synthetic construct
  source 1..22: mol_type = other RNA
taccagccacttttccaatgct

SEQ ID NO: 24685 - RNA, 22 nt, synthetic construct
  source 1..22: mol_type = other RNA
taccaggcatcttagcaactct

SEQ ID NO: 24686 - RNA, 22 nt, synthetic construct
  source 1..22: mol_type = other RNA
taccagttagtaactgatctca

SEQ ID NO: 24687 - RNA, 22 nt, synthetic construct
  source 1..22: mol_type = other RNA
taccatttgagacccttgctgc

SEQ ID NO: 24688 - RNA, 22 nt, synthetic construct
  source 1..22: mol_type = other RNA
tacccaaatcatagagacgtca

SEQ ID NO: 24689 - RNA, 22 nt, synthetic construct
  source 1..22: mol_type = other RNA
tacccaagatcaagagagggag

SEQ ID NO: 24690 - RNA, 22 nt, synthetic construct
  source 1..22: mol_type = other RNA
tacccagcagtgcttttattcc

SEQ ID NO: 24691 - RNA, 22 nt, synthetic construct
  source 1..22: mol_type = other RNA
tacccctttgcatccctaccag

SEQ ID NO: 24692 - RNA, 22 nt, synthetic construct
  source 1..22: mol_type = other RNA
tacccttgctgcttttaatcct

SEQ ID NO: 24693 - RNA, 22 nt, synthetic construct
  source 1..22: mol_type = other RNA
tacctctcatttctgttcttac

SEQ ID NO: 24694 - RNA, 22 nt, synthetic construct
  source 1..22: mol_type = other RNA
taccttaactattctgagcttt

SEQ ID NO: 24695 - RNA, 22 nt, synthetic construct
  source 1..22: mol_type = other RNA
tacgtggacattgatggttttc

SEQ ID NO: 24696 - RNA, 22 nt, synthetic construct
  source 1..22: mol_type = other RNA
tactaactggtaagaacagaaa

SEQ ID NO: 24697 - RNA, 22 nt, synthetic construct
  source 1..22: mol_type = other RNA
tactacacacacaaatatgacc

SEQ ID NO: 24698 - RNA, 22 nt, synthetic construct
  source 1..22: mol_type = other RNA
tactagaggagcaagtacaaca

SEQ ID NO: 24699 - RNA, 22 nt, synthetic construct
  source 1..22: mol_type = other RNA
tactaggagctcaggagtacaa

SEQ ID NO: 24700 - RNA, 22 nt, synthetic construct
  source 1..22: mol_type = other RNA
tactatgacccacgcagtacaa

SEQ ID NO: 24701 - RNA, 22 nt, synthetic construct
  source 1..22: mol_type = other RNA
tactcctgagctcctagtatac

SEQ ID NO: 24702 - RNA, 22 nt, synthetic construct
  source 1..22: mol_type = other RNA
tactctgatgtctagccaactt

SEQ ID NO: 24703 - RNA, 22 nt, synthetic construct
  source 1..22: mol_type = other RNA
tactgagcagtaaggaaataaa

SEQ ID NO: 24704 - RNA, 22 nt, synthetic construct
  source 1..22: mol_type = other RNA
tactgcgtgggtcatagtaatt

SEQ ID NO: 24705 - RNA, 22 nt, synthetic construct
  source 1..22: mol_type = other RNA
tactgctcagtaaaaagagaaa

SEQ ID NO: 24706 - RNA, 22 nt, synthetic construct
  source 1..22: mol_type = other RNA
tactgctttacagagaattgga

SEQ ID NO: 24707 - RNA, 22 nt, synthetic construct
  source 1..22: mol_type = other RNA
tactggcttgtactgtttacag

SEQ ID NO: 24708 - RNA, 22 nt, synthetic construct
  source 1..22: mol_type = other RNA
tactgtattagcaatataaaaa

SEQ ID NO: 24709 - RNA, 22 nt, synthetic construct
  source 1..22: mol_type = other RNA
tactgtccacagttgcaattca

SEQ ID NO: 24710 - RNA, 22 nt, synthetic construct
  source 1..22: mol_type = other RNA
tactgtttacagcaagttgtct

SEQ ID NO: 24711 - RNA, 22 nt, synthetic construct
  source 1..22: mol_type = other RNA
tacttaaagttggctagacatc

SEQ ID NO: 24712 - RNA, 22 nt, synthetic construct
  source 1..22: mol_type = other RNA
tacttatcatttttggagcatt

SEQ ID NO: 24713 - RNA, 22 nt, synthetic construct
  source 1..22: mol_type = other RNA
tacttgatcccattttccattt

SEQ ID NO: 24714 - RNA, 22 nt, synthetic construct
  source 1..22: mol_type = other RNA
tacttgctcctctagtattcag

SEQ ID NO: 24715 - RNA, 22 nt, synthetic construct
  source 1..22: mol_type = other RNA
tactttgtgattgttttctata

SEQ ID NO: 24716 - RNA, 22 nt, synthetic construct
  source 1..22: mol_type = other RNA
tagaaaaatgctccaaaaatga

SEQ ID NO: 24717 - RNA, 22 nt, synthetic construct
  source 1..22: mol_type = other RNA
tagaaaaattttagcttttgct

SEQ ID NO: 24718 - RNA, 22 nt, synthetic construct
  source 1..22: mol_type = other RNA
tagaaaacaatcacaaagtaag

SEQ ID NO: 24719 - RNA, 22 nt, synthetic construct
  source 1..22: mol_type = other RNA
tagaacaacagaccatggaagg

SEQ ID NO: 24720 - RNA, 22 nt, synthetic construct
  source 1..22: mol_type = other RNA
tagacaacttgctgtaaacagt

SEQ ID NO: 24721 - RNA, 22 nt, synthetic construct
  source 1..22: mol_type = other RNA
tagacatcagagtatactagga

SEQ ID NO: 24722 - RNA, 22 nt, synthetic construct
  source 1..22: mol_type = other RNA
tagactttcctcaatttaacag

SEQ ID NO: 24723 - RNA, 22 nt, synthetic construct
  source 1..22: mol_type = other RNA
tagagacagacataaagcatga

SEQ ID NO: 24724 - RNA, 22 nt, synthetic construct
  source 1..22: mol_type = other RNA
tagagacgtcatatatctttgt

SEQ ID NO: 24725 - RNA, 22 nt, synthetic construct
  source 1..22: mol_type = other RNA
tagagagcctggggagagaggg

SEQ ID NO: 24726 - RNA, 22 nt, synthetic construct
  source 1..22: mol_type = other RNA
tagagcatgaaaatgacaggtg

SEQ ID NO: 24727 - RNA, 22 nt, synthetic construct
  source 1..22: mol_type = other RNA
tagagctcctccaatcaagtgt

SEQ ID NO: 24728 - RNA, 22 nt, synthetic construct
  source 1..22: mol_type = other RNA
tagaggaagaaaaagggagatg

SEQ ID NO: 24729 - RNA, 22 nt, synthetic construct
  source 1..22: mol_type = other RNA
tagaggagcaagtacaacaaat

SEQ ID NO: 24730 - RNA, 22 nt, synthetic construct
  source 1..22: mol_type = other RNA
tagcaactctcactcatacttg

SEQ ID NO: 24731 - RNA, 22 nt, synthetic construct
  source 1..22: mol_type = other RNA
tagcactagctttctccctctc

SEQ ID NO: 24732 - RNA, 22 nt, synthetic construct
  source 1..22: mol_type = other RNA
tagcattccaaaaagaaccacc

SEQ ID NO: 24733 - RNA, 22 nt, synthetic construct
  source 1..22: mol_type = other RNA
tagccaactttaagtaaatgga

SEQ ID NO: 24734 - RNA, 22 nt, synthetic construct
  source 1..22: mol_type = other RNA
tagccccggacttgttctgtgg

SEQ ID NO: 24735 - RNA, 22 nt, synthetic construct
  source 1..22: mol_type = other RNA
tagcctggtgtctcgcgaaacc

SEQ ID NO: 24736 - RNA, 22 nt, synthetic construct
  source 1..22: mol_type = other RNA
tagctcctgtaacagtttaatg

SEQ ID NO: 24737 - RNA, 22 nt, synthetic construct
  source 1..22: mol_type = other RNA
tagctgaaagctaagtccaaca

SEQ ID NO: 24738 - RNA, 22 nt, synthetic construct
  source 1..22: mol_type = other RNA
tagctgggattctgtccctgac

SEQ ID NO: 24739 - RNA, 22 nt, synthetic construct
  source 1..22: mol_type = other RNA
tagctgtagccccggacttgtt

SEQ ID NO: 24740 - RNA, 22 nt, synthetic construct
  source 1..22: mol_type = other RNA
tagcttccaaattgctgtctct

SEQ ID NO: 24741 - RNA, 22 nt, synthetic construct
  source 1..22: mol_type = other RNA
tagctttctccctctcttgatc

SEQ ID NO: 24742 - RNA, 22 nt, synthetic construct
  source 1..22: mol_type = other RNA
tagcttttgcttgagaaaccag

SEQ ID NO: 24743 - RNA, 22 nt, synthetic construct
  source 1..22: mol_type = other RNA
taggacaatcatcctaacaaga

SEQ ID NO: 24744 - RNA, 22 nt, synthetic construct
  source 1..22: mol_type = other RNA
taggacagaaatttaggctggg

SEQ ID NO: 24745 - RNA, 22 nt, synthetic construct
  source 1..22: mol_type = other RNA
taggagctcaggagtacaagac

SEQ ID NO: 24746 - RNA, 22 nt, synthetic construct
  source 1..22: mol_type = other RNA
taggatgattgtcctaaaggaa

SEQ ID NO: 24747 - RNA, 22 nt, synthetic construct
  source 1..22: mol_type = other RNA
taggcaacatctccctttttct

SEQ ID NO: 24748 - RNA, 22 nt, synthetic construct
  source 1..22: mol_type = other RNA
taggctgggttcatttgtatca

SEQ ID NO: 24749 - RNA, 22 nt, synthetic construct
  source 1..22: mol_type = other RNA
tagggaggaataaaagcactgc

SEQ ID NO: 24750 - RNA, 22 nt, synthetic construct
  source 1..22: mol_type = other RNA
tagggaggtgagattccattaa

SEQ ID NO: 24751 - RNA, 22 nt, synthetic construct
  source 1..22: mol_type = other RNA
tagggatgcaaaggggtagaga

SEQ ID NO: 24752 - RNA, 22 nt, synthetic construct
  source 1..22: mol_type = other RNA
taggtctgtgtgatacaaatga

SEQ ID NO: 24753 - RNA, 22 nt, synthetic construct
  source 1..22: mol_type = other RNA
tagtaactgatctcagatgcct

SEQ ID NO: 24754 - RNA, 22 nt, synthetic construct
  source 1..22: mol_type = other RNA
tagtaattctggggttgttgtc

SEQ ID NO: 24755 - RNA, 22 nt, synthetic construct
  source 1..22: mol_type = other RNA
tagtatactctgatgtctagcc

SEQ ID NO: 24756 - RNA, 22 nt, synthetic construct
  source 1..22: mol_type = other RNA
tagtattcagacatagcactag

SEQ ID NO: 24757 - RNA, 22 nt, synthetic construct
  source 1..22: mol_type = other RNA
tagtcaagatcacctggactgt

SEQ ID NO: 24758 - RNA, 22 nt, synthetic construct
  source 1..22: mol_type = other RNA
tagtcataccagccacttttcc

SEQ ID NO: 24759 - RNA, 22 nt, synthetic construct
  source 1..22: mol_type = other RNA
tagtgctatgtctgaatactag

SEQ ID NO: 24760 - RNA, 22 nt, synthetic construct
  source 1..22: mol_type = other RNA
tagtgtcttgtactcctgagct

SEQ ID NO: 24761 - RNA, 22 nt, synthetic construct
  source 1..22: mol_type = other RNA
tagtgttatcttttgatccatc

SEQ ID NO: 24762 - RNA, 22 nt, synthetic construct
  source 1..22: mol_type = other RNA
tagttaaggtaatttaaatcag

SEQ ID NO: 24763 - RNA, 22 nt, synthetic construct
  source 1..22: mol_type = other RNA
tagttcacgttcttaaatgttt

SEQ ID NO: 24764 - RNA, 22 nt, synthetic construct
  source 1..22: mol_type = other RNA
tataaaaagcatttggtgttaa

SEQ ID NO: 24765 - RNA, 22 nt, synthetic construct
  source 1..22: mol_type = other RNA
tataaaactcaggtgatcatgc

SEQ ID NO: 24766 - RNA, 22 nt, synthetic construct
  source 1..22: mol_type = other RNA
tataactcaagatatgatgctt

SEQ ID NO: 24767 - RNA, 22 nt, synthetic construct
  source 1..22: mol_type = other RNA
tataataccaacattttaacac

SEQ ID NO: 24768 - RNA, 22 nt, synthetic construct
  source 1..22: mol_type = other RNA
tataattcctcaggataaaact

SEQ ID NO: 24769 - RNA, 22 nt, synthetic construct
  source 1..22: mol_type = other RNA
tataccatttgagacccttgct

SEQ ID NO: 24770 - RNA, 22 nt, synthetic construct
  source 1..22: mol_type = other RNA
tatactaggagctcaggagtac

SEQ ID NO: 24771 - RNA, 22 nt, synthetic construct
  source 1..22: mol_type = other RNA
tatactctgatgtctagccaac

SEQ ID NO: 24772 - RNA, 22 nt, synthetic construct
  source 1..22: mol_type = other RNA
tatactgtccacagttgcaatt

SEQ ID NO: 24773 - RNA, 22 nt, synthetic construct
  source 1..22: mol_type = other RNA
tatagctgtagccccggacttg

SEQ ID NO: 24774 - RNA, 22 nt, synthetic construct
  source 1..22: mol_type = other RNA
tatatatttagctgaaagctaa

SEQ ID NO: 24775 - RNA, 22 nt, synthetic construct
  source 1..22: mol_type = other RNA
tatatcagaacttgaatgaaga

SEQ ID NO: 24776 - RNA, 22 nt, synthetic construct
  source 1..22: mol_type = other RNA
tatatctttgtggggtggttct

SEQ ID NO: 24777 - RNA, 22 nt, synthetic construct
  source 1..22: mol_type = other RNA
tatatgacgtctctatgatttg

SEQ ID NO: 24778 - RNA, 22 nt, synthetic construct
  source 1..22: mol_type = other RNA
tatatgtggcccaagacagttc

SEQ ID NO: 24779 - RNA, 22 nt, synthetic construct
  source 1..22: mol_type = other RNA
tatatttaactatgtagctcct

SEQ ID NO: 24780 - RNA, 22 nt, synthetic construct
  source 1..22: mol_type = other RNA
tatatttagctgaaagctaagt

SEQ ID NO: 24781 - RNA, 22 nt, synthetic construct
  source 1..22: mol_type = other RNA
tatcacacagacctattcttca

SEQ ID NO: 24782 - RNA, 22 nt, synthetic construct
  source 1..22: mol_type = other RNA
tatcacacaggcatctgagatc

SEQ ID NO: 24783 - RNA, 22 nt, synthetic construct
  source 1..22: mol_type = other RNA
tatcactacttatcatttttgg

SEQ ID NO: 24784 - RNA, 22 nt, synthetic construct
  source 1..22: mol_type = other RNA
tatcagaacttgaatgaagaat

SEQ ID NO: 24785 - RNA, 22 nt, synthetic construct
  source 1..22: mol_type = other RNA
tatcatttttggagcatttttc

SEQ ID NO: 24786 - RNA, 22 nt, synthetic construct
  source 1..22: mol_type = other RNA
tatccagggaccttatgcatca

SEQ ID NO: 24787 - RNA, 22 nt, synthetic construct
  source 1..22: mol_type = other RNA
tatcctgaggaattataatacc

SEQ ID NO: 24788 - RNA, 22 nt, synthetic construct
  source 1..22: mol_type = other RNA
tatcctttttccttagctggga

SEQ ID NO: 24789 - RNA, 22 nt, synthetic construct
  source 1..22: mol_type = other RNA
tatctaatttgaattgcaactg

SEQ ID NO: 24790 - RNA, 22 nt, synthetic construct
  source 1..22: mol_type = other RNA
tatcttcctttaggacaatcat

SEQ ID NO: 24791 - RNA, 22 nt, synthetic construct
  source 1..22: mol_type = other RNA
tatcttgagttatagaaaacaa

SEQ ID NO: 24792 - RNA, 22 nt, synthetic construct
  source 1..22: mol_type = other RNA
tatctttgtggggtggttcttt

SEQ ID NO: 24793 - RNA, 22 nt, synthetic construct
  source 1..22: mol_type = other RNA
tatcttttgatccatcttacat

SEQ ID NO: 24794 - RNA, 22 nt, synthetic construct
  source 1..22: mol_type = other RNA
tatgacccaaactgccctttta

SEQ ID NO: 24795 - RNA, 22 nt, synthetic construct
  source 1..22: mol_type = other RNA
tatgacccacgcagtacaaact

SEQ ID NO: 24796 - RNA, 22 nt, synthetic construct
  source 1..22: mol_type = other RNA
tatgacctctctcctgaagtca

SEQ ID NO: 24797 - RNA, 22 nt, synthetic construct
  source 1..22: mol_type = other RNA
tatgacgtctctatgatttggg

SEQ ID NO: 24798 - RNA, 22 nt, synthetic construct
  source 1..22: mol_type = other RNA
tatgagtgagagttgctaagat

SEQ ID NO: 24799 - RNA, 22 nt, synthetic construct
  source 1..22: mol_type = other RNA
tatgatgcttagagctcctcca

SEQ ID NO: 24800 - RNA, 22 nt, synthetic construct
  source 1..22: mol_type = other RNA
tatgatttgggtaactgcaatt

SEQ ID NO: 24801 - RNA, 22 nt, synthetic construct
  source 1..22: mol_type = other RNA
tatgcatcacattcacgagaac

SEQ ID NO: 24802 - RNA, 22 nt, synthetic construct
  source 1..22: mol_type = other RNA
tatggtttgacattttattaat

SEQ ID NO: 24803 - RNA, 22 nt, synthetic construct
  source 1..22: mol_type = other RNA
tatgtagctcctgtaacagttt

SEQ ID NO: 24804 - RNA, 22 nt, synthetic construct
  source 1..22: mol_type = other RNA
tatgtctgaatactagaggagc

SEQ ID NO: 24805 - RNA, 22 nt, synthetic construct
  source 1..22: mol_type = other RNA
tatgtctgtctctagaaaaatg

SEQ ID NO: 24806 - RNA, 22 nt, synthetic construct
  source 1..22: mol_type = other RNA
tatgtggaaaatagtgaaaaat

SEQ ID NO: 24807 - RNA, 22 nt, synthetic construct
  source 1..22: mol_type = other RNA
tatgtggcccaagacagttctt

SEQ ID NO: 24808 - RNA, 22 nt, synthetic construct
  source 1..22: mol_type = other RNA
tattaagatttaacctgatgct

SEQ ID NO: 24809 - RNA, 22 nt, synthetic construct
  source 1..22: mol_type = other RNA
tattaatcttgagcattggaaa

SEQ ID NO: 24810 - RNA, 22 nt, synthetic construct
  source 1..22: mol_type = other RNA
tattatatatttagctgaaagc

SEQ ID NO: 24811 - RNA, 22 nt, synthetic construct
  source 1..22: mol_type = other RNA
tattcagacatagcactagctt

SEQ ID NO: 24812 - RNA, 22 nt, synthetic construct
  source 1..22: mol_type = other RNA
tattcctccctagttcacgttc

SEQ ID NO: 24813 - RNA, 22 nt, synthetic construct
  source 1..22: mol_type = other RNA
tattccttcaaaaagctcagaa

SEQ ID NO: 24814 - RNA, 22 nt, synthetic construct
  source 1..22: mol_type = other RNA
tattctgagctttttgaaggaa

SEQ ID NO: 24815 - RNA, 22 nt, synthetic construct
  source 1..22: mol_type = other RNA
tattctgtaatccacagaacaa

SEQ ID NO: 24816 - RNA, 22 nt, synthetic construct
  source 1..22: mol_type = other RNA
tatttaactatgtagctcctgt

SEQ ID NO: 24817 - RNA, 22 nt, synthetic construct
  source 1..22: mol_type = other RNA
tatttagaggaagaaaaaggga

SEQ ID NO: 24818 - RNA, 22 nt, synthetic construct
  source 1..22: mol_type = other RNA
tatttagctgaaagctaagtcc

SEQ ID NO: 24819 - RNA, 22 nt, synthetic construct
  source 1..22: mol_type = other RNA
tatttccttactgctcagtaaa

SEQ ID NO: 24820 - RNA, 22 nt, synthetic construct
  source 1..22: mol_type = other RNA
tatttgtgtgtgtagtatgtgg

SEQ ID NO: 24821 - RNA, 22 nt, synthetic construct
  source 1..22: mol_type = other RNA
tattttccacatactacacaca

SEQ ID NO: 24822 - RNA, 22 nt, synthetic construct
  source 1..22: mol_type = other RNA
tcaaaaagctcagaatagttaa

SEQ ID NO: 24823 - RNA, 22 nt, synthetic construct
  source 1..22: mol_type = other RNA
tcaaaagataacactaaagaca

SEQ ID NO: 24824 - RNA, 22 nt, synthetic construct
  source 1..22: mol_type = other RNA
tcaaaccataaagacatttaca

SEQ ID NO: 24825 - RNA, 22 nt, synthetic construct
  source 1..22: mol_type = other RNA
tcaaagctgtcctgggtcccat

SEQ ID NO: 24826 - RNA, 22 nt, synthetic construct
  source 1..22: mol_type = other RNA
tcaaatggtataaaactcaggt

SEQ ID NO: 24827 - RNA, 22 nt, synthetic construct
  source 1..22: mol_type = other RNA
tcaaatgtcatctcccctttgg

SEQ ID NO: 24828 - RNA, 22 nt, synthetic construct
  source 1..22: mol_type = other RNA
tcaagagagggagaaagctagt

SEQ ID NO: 24829 - RNA, 22 nt, synthetic construct
  source 1..22: mol_type = other RNA
tcaagataaacatttaagaacg

SEQ ID NO: 24830 - RNA, 22 nt, synthetic construct
  source 1..22: mol_type = other RNA
tcaagatatgatgcttagagct

SEQ ID NO: 24831 - RNA, 22 nt, synthetic construct
  source 1..22: mol_type = other RNA
tcaagatcacctggactgtgaa

SEQ ID NO: 24832 - RNA, 22 nt, synthetic construct
  source 1..22: mol_type = other RNA
tcaagccccagctcaagcctta

SEQ ID NO: 24833 - RNA, 22 nt, synthetic construct
  source 1..22: mol_type = other RNA
tcaagccttaatttgtggtgga

SEQ ID NO: 24834 - RNA, 22 nt, synthetic construct
  source 1..22: mol_type = other RNA
tcaagtatgagtgagagttgct

SEQ ID NO: 24835 - RNA, 22 nt, synthetic construct
  source 1..22: mol_type = other RNA
tcaagtgtttccaggaagtgaa

SEQ ID NO: 24836 - RNA, 22 nt, synthetic construct
  source 1..22: mol_type = other RNA
tcaagttctgatatatttaact

SEQ ID NO: 24837 - RNA, 22 nt, synthetic construct
  source 1..22: mol_type = other RNA
tcaatgtccacgtattctgtaa

SEQ ID NO: 24838 - RNA, 22 nt, synthetic construct
  source 1..22: mol_type = other RNA
tcacaaagtaagttttatcctg

SEQ ID NO: 24839 - RNA, 22 nt, synthetic construct
  source 1..22: mol_type = other RNA
tcacacagacctattcttcatt

SEQ ID NO: 24840 - RNA, 22 nt, synthetic construct
  source 1..22: mol_type = other RNA
tcacacaggcatctgagatcag

SEQ ID NO: 24841 - RNA, 22 nt, synthetic construct
  source 1..22: mol_type = other RNA
tcacagtccaggtgatcttgac

SEQ ID NO: 24842 - RNA, 22 nt, synthetic construct
  source 1..22: mol_type = other RNA
tcacatggaatgaattgcagtt

SEQ ID NO: 24843 - RNA, 22 nt, synthetic construct
  source 1..22: mol_type = other RNA
tcacattcacgagaacagaatt

SEQ ID NO: 24844 - RNA, 22 nt, synthetic construct
  source 1..22: mol_type = other RNA
tcaccctctctccccaggctct

SEQ ID NO: 24845 - RNA, 22 nt, synthetic construct
  source 1..22: mol_type = other RNA
tcacctccctaaaattcattat

SEQ ID NO: 24846 - RNA, 22 nt, synthetic construct
  source 1..22: mol_type = other RNA
tcacctgagttttataccattt

SEQ ID NO: 24847 - RNA, 22 nt, synthetic construct
  source 1..22: mol_type = other RNA
tcacctggactgtgaagacggt

SEQ ID NO: 24848 - RNA, 22 nt, synthetic construct
  source 1..22: mol_type = other RNA
tcacctgtcattttcatgctct

SEQ ID NO: 24849 - RNA, 22 nt, synthetic construct
  source 1..22: mol_type = other RNA
tcacgagaacagaattcatcct

SEQ ID NO: 24850 - RNA, 22 nt, synthetic construct
  source 1..22: mol_type = other RNA
tcacgttcttaaatgtttatct

SEQ ID NO: 24851 - RNA, 22 nt, synthetic construct
  source 1..22: mol_type = other RNA
tcactacttatcatttttggag

SEQ ID NO: 24852 - RNA, 22 nt, synthetic construct
  source 1..22: mol_type = other RNA
tcactattttccacatactaca

SEQ ID NO: 24853 - RNA, 22 nt, synthetic construct
  source 1..22: mol_type = other RNA
tcactcatacttgatcccattt

SEQ ID NO: 24854 - RNA, 22 nt, synthetic construct
  source 1..22: mol_type = other RNA
tcactccatttacttaaagttg

SEQ ID NO: 24855 - RNA, 22 nt, synthetic construct
  source 1..22: mol_type = other RNA
tcactgttgtccaaggcaggca

SEQ ID NO: 24856 - RNA, 22 nt, synthetic construct
  source 1..22: mol_type = other RNA
tcacttcctggaaacacttgat

SEQ ID NO: 24857 - RNA, 22 nt, synthetic construct
  source 1..22: mol_type = other RNA
tcagaacttgaatgaagaatag

SEQ ID NO: 24858 - RNA, 22 nt, synthetic construct
  source 1..22: mol_type = other RNA
tcagaagaaaactgctttttta

SEQ ID NO: 24859 - RNA, 22 nt, synthetic construct
  source 1..22: mol_type = other RNA
tcagaatagttaaggtaattta

SEQ ID NO: 24860 - RNA, 22 nt, synthetic construct
  source 1..22: mol_type = other RNA
tcagacatagcactagctttct

SEQ ID NO: 24861 - RNA, 22 nt, synthetic construct
  source 1..22: mol_type = other RNA
tcagagtatactaggagctcag

SEQ ID NO: 24862 - RNA, 22 nt, synthetic construct
  source 1..22: mol_type = other RNA
tcagatccaattctctgtaaag

SEQ ID NO: 24863 - RNA, 22 nt, synthetic construct
  source 1..22: mol_type = other RNA
tcagatgcctgtgtgatagctt

SEQ ID NO: 24864 - RNA, 22 nt, synthetic construct
  source 1..22: mol_type = other RNA
tcagcaatgacaacaaccccag

SEQ ID NO: 24865 - RNA, 22 nt, synthetic construct
  source 1..22: mol_type = other RNA
tcagctgtcctttatatgtggc

SEQ ID NO: 24866 - RNA, 22 nt, synthetic construct
  source 1..22: mol_type = other RNA
tcagcttttatttccttactgc

SEQ ID NO: 24867 - RNA, 22 nt, synthetic construct
  source 1..22: mol_type = other RNA
tcaggagagaggtcatatttgt

SEQ ID NO: 24868 - RNA, 22 nt, synthetic construct
  source 1..22: mol_type = other RNA
tcaggagtacaagacactattc

SEQ ID NO: 24869 - RNA, 22 nt, synthetic construct
  source 1..22: mol_type = other RNA
tcaggagtcagaagaaaactgc

SEQ ID NO: 24870 - RNA, 22 nt, synthetic construct
  source 1..22: mol_type = other RNA
tcaggataaaacttactttgtg

SEQ ID NO: 24871 - RNA, 22 nt, synthetic construct
  source 1..22: mol_type = other RNA
tcagggacagaatcccagctaa

SEQ ID NO: 24872 - RNA, 22 nt, synthetic construct
  source 1..22: mol_type = other RNA
tcaggtgatcatgctttatgtc

SEQ ID NO: 24873 - RNA, 22 nt, synthetic construct
  source 1..22: mol_type = other RNA
tcagtaaaaagagaaaaccatc

SEQ ID NO: 24874 - RNA, 22 nt, synthetic construct
  source 1..22: mol_type = other RNA
tcagttactaactggtaagaac

SEQ ID NO: 24875 - RNA, 22 nt, synthetic construct
  source 1..22: mol_type = other RNA
tcagttctttagtcataccagc

SEQ ID NO: 24876 - RNA, 22 nt, synthetic construct
  source 1..22: mol_type = other RNA
tcataccagccacttttccaat

SEQ ID NO: 24877 - RNA, 22 nt, synthetic construct
  source 1..22: mol_type = other RNA
tcatacttgatcccattttcca

SEQ ID NO: 24878 - RNA, 22 nt, synthetic construct
  source 1..22: mol_type = other RNA
tcatagaacaacagaccatgga

SEQ ID NO: 24879 - RNA, 22 nt, synthetic construct
  source 1..22: mol_type = other RNA
tcatagagacgtcatatatctt

SEQ ID NO: 24880 - RNA, 22 nt, synthetic construct
  source 1..22: mol_type = other RNA
tcatagtaattctggggttgtt

SEQ ID NO: 24881 - RNA, 22 nt, synthetic construct
  source 1..22: mol_type = other RNA
tcatatatctttgtggggtggt

SEQ ID NO: 24882 - RNA, 22 nt, synthetic construct
  source 1..22: mol_type = other RNA
tcatatcttgagttatagaaaa

SEQ ID NO: 24883 - RNA, 22 nt, synthetic construct
  source 1..22: mol_type = other RNA
tcatatttgtgtgtgtagtatg

SEQ ID NO: 24884 - RNA, 22 nt, synthetic construct
  source 1..22: mol_type = other RNA
tcatcagctgtcctttatatgt

SEQ ID NO: 24885 - RNA, 22 nt, synthetic construct
  source 1..22: mol_type = other RNA
tcatcctaacaagatgtaagat

SEQ ID NO: 24886 - RNA, 22 nt, synthetic construct
  source 1..22: mol_type = other RNA
tcatcctgtaaaccaggggtgt

SEQ ID NO: 24887 - RNA, 22 nt, synthetic construct
  source 1..22: mol_type = other RNA
tcatctcccctttggtcatgcc

SEQ ID NO: 24888 - RNA, 22 nt, synthetic construct
  source 1..22: mol_type = other RNA
tcatgccttccatggtctgttg

SEQ ID NO: 24889 - RNA, 22 nt, synthetic construct
  source 1..22: mol_type = other RNA
tcatgctctatcttcctttagg

SEQ ID NO: 24890 - RNA, 22 nt, synthetic construct
  source 1..22: mol_type = other RNA
tcatgctttatgtctgtctcta

SEQ ID NO: 24891 - RNA, 22 nt, synthetic construct
  source 1..22: mol_type = other RNA
tcattaacgcttgctttcactg

SEQ ID NO: 24892 - RNA, 22 nt, synthetic construct
  source 1..22: mol_type = other RNA
tcattccatgtgacttcaggag

SEQ ID NO: 24893 - RNA, 22 nt, synthetic construct
  source 1..22: mol_type = other RNA
tcatttctgttcttaccagtta

SEQ ID NO: 24894 - RNA, 22 nt, synthetic construct
  source 1..22: mol_type = other RNA
tcatttgtatcacacagaccta

SEQ ID NO: 24895 - RNA, 22 nt, synthetic construct
  source 1..22: mol_type = other RNA
tcattttatcctttttccttag

SEQ ID NO: 24896 - RNA, 22 nt, synthetic construct
  source 1..22: mol_type = other RNA
tcattttcatgctctatcttcc

SEQ ID NO: 24897 - RNA, 22 nt, synthetic construct
  source 1..22: mol_type = other RNA
tcatttttcactattttccaca

SEQ ID NO: 24898 - RNA, 22 nt, synthetic construct
  source 1..22: mol_type = other RNA
tcatttttggagcatttttcta

SEQ ID NO: 24899 - RNA, 22 nt, synthetic construct
  source 1..22: mol_type = other RNA
tccaaaaagaaccaccccacaa

SEQ ID NO: 24900 - RNA, 22 nt, synthetic construct
  source 1..22: mol_type = other RNA
tccaaaaatgataagtagtgat

SEQ ID NO: 24901 - RNA, 22 nt, synthetic construct
  source 1..22: mol_type = other RNA
tccaaactcattaacgcttgct

SEQ ID NO: 24902 - RNA, 22 nt, synthetic construct
  source 1..22: mol_type = other RNA
tccaaattgctgtctctgtctt

SEQ ID NO: 24903 - RNA, 22 nt, synthetic construct
  source 1..22: mol_type = other RNA
tccaacaaaccatttttaaaga

SEQ ID NO: 24904 - RNA, 22 nt, synthetic construct
  source 1..22: mol_type = other RNA
tccaaggcaggcacatctttaa

SEQ ID NO: 24905 - RNA, 22 nt, synthetic construct
  source 1..22: mol_type = other RNA
tccaatcaagtgtttccaggaa

SEQ ID NO: 24906 - RNA, 22 nt, synthetic construct
  source 1..22: mol_type = other RNA
tccaatgctcaagattaataaa

SEQ ID NO: 24907 - RNA, 22 nt, synthetic construct
  source 1..22: mol_type = other RNA
tccaattctctgtaaagcagta

SEQ ID NO: 24908 - RNA, 22 nt, synthetic construct
  source 1..22: mol_type = other RNA
tccacagaacaagtccggggct

SEQ ID NO: 24909 - RNA, 22 nt, synthetic construct
  source 1..22: mol_type = other RNA
tccacagttgcaattcaaatta

SEQ ID NO: 24910 - RNA, 22 nt, synthetic construct
  source 1..22: mol_type = other RNA
tccacatactacacacacaaat

SEQ ID NO: 24911 - RNA, 22 nt, synthetic construct
  source 1..22: mol_type = other RNA
tccaccacaaattaaggcttga

SEQ ID NO: 24912 - RNA, 22 nt, synthetic construct
  source 1..22: mol_type = other RNA
tccacgtattctgtaatccaca

SEQ ID NO: 24913 - RNA, 22 nt, synthetic construct
  source 1..22: mol_type = other RNA
tccaggaagtgaaaacttgtag

SEQ ID NO: 24914 - RNA, 22 nt, synthetic construct
  source 1..22: mol_type = other RNA
tccagggaccttatgcatcaca

SEQ ID NO: 24915 - RNA, 22 nt, synthetic construct
  source 1..22: mol_type = other RNA
tccaggtgatcttgactactgc

SEQ ID NO: 24916 - RNA, 22 nt, synthetic construct
  source 1..22: mol_type = other RNA
tccatcttacatcttgttagga

SEQ ID NO: 24917 - RNA, 22 nt, synthetic construct
  source 1..22: mol_type = other RNA
tccatggtctgttgttctatga

SEQ ID NO: 24918 - RNA, 22 nt, synthetic construct
  source 1..22: mol_type = other RNA
tccatgtgacttcaggagagag

SEQ ID NO: 24919 - RNA, 22 nt, synthetic construct
  source 1..22: mol_type = other RNA
tccattaaactgttacaggagc

SEQ ID NO: 24920 - RNA, 22 nt, synthetic construct
  source 1..22: mol_type = other RNA
tccattactggcttgtactgtt

SEQ ID NO: 24921 - RNA, 22 nt, synthetic construct
  source 1..22: mol_type = other RNA
tccatttacttaaagttggcta

SEQ ID NO: 24922 - RNA, 22 nt, synthetic construct
  source 1..22: mol_type = other RNA
tccatttgttgtacttgctcct

SEQ ID NO: 24923 - RNA, 22 nt, synthetic construct
  source 1..22: mol_type = other RNA
tcccagctaaggaaaaaggata

SEQ ID NO: 24924 - RNA, 22 nt, synthetic construct
  source 1..22: mol_type = other RNA
tcccatgcggcccgcgggttag

SEQ ID NO: 24925 - RNA, 22 nt, synthetic construct
  source 1..22: mol_type = other RNA
tcccattttccatttgttgtac

SEQ ID NO: 24926 - RNA, 22 nt, synthetic construct
  source 1..22: mol_type = other RNA
tccccaggctctctaccccttt

SEQ ID NO: 24927 - RNA, 22 nt, synthetic construct
  source 1..22: mol_type = other RNA
tcccctttggtcatgccttcca

SEQ ID NO: 24928 - RNA, 22 nt, synthetic construct
  source 1..22: mol_type = other RNA
tccctaccaggcatcttagcaa

SEQ ID NO: 24929 - RNA, 22 nt, synthetic construct
  source 1..22: mol_type = other RNA
tccctagttcacgttcttaaat

SEQ ID NO: 24930 - RNA, 22 nt, synthetic construct
  source 1..22: mol_type = other RNA
tccctcaccctctctccccagg

SEQ ID NO: 24931 - RNA, 22 nt, synthetic construct
  source 1..22: mol_type = other RNA
tccctccctcaccctctctccc

SEQ ID NO: 24932 - RNA, 22 nt, synthetic construct
  source 1..22: mol_type = other RNA
tccctctcttgatcttgggtag

SEQ ID NO: 24933 - RNA, 22 nt, synthetic construct
  source 1..22: mol_type = other RNA
tccctgaccgtcttcacagtcc

SEQ ID NO: 24934 - RNA, 22 nt, synthetic construct
  source 1..22: mol_type = other RNA
tccctggatagactttcctcaa

SEQ ID NO: 24935 - RNA, 22 nt, synthetic construct
  source 1..22: mol_type = other RNA
tccctgggccacactgcaagaa

SEQ ID NO: 24936 - RNA, 22 nt, synthetic construct
  source 1..22: mol_type = other RNA
tccctttttcttcctctaaata

SEQ ID NO: 24937 - RNA, 22 nt, synthetic construct
  source 1..22: mol_type = other RNA
tccggggctacagctatactgt

SEQ ID NO: 24938 - RNA, 22 nt, synthetic construct
  source 1..22: mol_type = other RNA
tcctaaaggaagatagagcatg

SEQ ID NO: 24939 - RNA, 22 nt, synthetic construct
  source 1..22: mol_type = other RNA
tcctaacaagatgtaagatgga

SEQ ID NO: 24940 - RNA, 22 nt, synthetic construct
  source 1..22: mol_type = other RNA
tcctacaagttttcacttcctg

SEQ ID NO: 24941 - RNA, 22 nt, synthetic construct
  source 1..22: mol_type = other RNA
tcctagtatactctgatgtcta

SEQ ID NO: 24942 - RNA, 22 nt, synthetic construct
  source 1..22: mol_type = other RNA
tcctcaatttaacagctttttc

SEQ ID NO: 24943 - RNA, 22 nt, synthetic construct
  source 1..22: mol_type = other RNA
tcctcaggataaaacttacttt

SEQ ID NO: 24944 - RNA, 22 nt, synthetic construct
  source 1..22: mol_type = other RNA
tcctccaatcaagtgtttccag

SEQ ID NO: 24945 - RNA, 22 nt, synthetic construct
  source 1..22: mol_type = other RNA
tcctccctagttcacgttctta

SEQ ID NO: 24946 - RNA, 22 nt, synthetic construct
  source 1..22: mol_type = other RNA
tcctctaaatacctctcatttc

SEQ ID NO: 24947 - RNA, 22 nt, synthetic construct
  source 1..22: mol_type = other RNA
tcctctagtattcagacatagc

SEQ ID NO: 24948 - RNA, 22 nt, synthetic construct
  source 1..22: mol_type = other RNA
tcctgaagtcacatggaatgaa

SEQ ID NO: 24949 - RNA, 22 nt, synthetic construct
  source 1..22: mol_type = other RNA
tcctgagcagtttgtactgcgt

SEQ ID NO: 24950 - RNA, 22 nt, synthetic construct
  source 1..22: mol_type = other RNA
tcctgagctcctagtatactct

SEQ ID NO: 24951 - RNA, 22 nt, synthetic construct
  source 1..22: mol_type = other RNA
tcctgaggaattataataccaa

SEQ ID NO: 24952 - RNA, 22 nt, synthetic construct
  source 1..22: mol_type = other RNA
tcctgcagattcaaatgtcatc

SEQ ID NO: 24953 - RNA, 22 nt, synthetic construct
  source 1..22: mol_type = other RNA
tcctggaaacacttgattggag

SEQ ID NO: 24954 - RNA, 22 nt, synthetic construct
  source 1..22: mol_type = other RNA
tcctgggtcccatgcggcccgc

SEQ ID NO: 24955 - RNA, 22 nt, synthetic construct
  source 1..22: mol_type = other RNA
tcctgtaaaccaggggtgtcca

SEQ ID NO: 24956 - RNA, 22 nt, synthetic construct
  source 1..22: mol_type = other RNA
tcctgtaacagtttaatggaat

SEQ ID NO: 24957 - RNA, 22 nt, synthetic construct
  source 1..22: mol_type = other RNA
tccttactgctcagtaaaaaga

SEQ ID NO: 24958 - RNA, 22 nt, synthetic construct
  source 1..22: mol_type = other RNA
tccttagctgggattctgtccc

SEQ ID NO: 24959 - RNA, 22 nt, synthetic construct
  source 1..22: mol_type = other RNA
tccttcaaaaagctcagaatag

SEQ ID NO: 24960 - RNA, 22 nt, synthetic construct
  source 1..22: mol_type = other RNA
tcctttaggacaatcatcctaa

SEQ ID NO: 24961 - RNA, 22 nt, synthetic construct
  source 1..22: mol_type = other RNA
tcctttatatgtggcccaagac

SEQ ID NO: 24962 - RNA, 22 nt, synthetic construct
  source 1..22: mol_type = other RNA
tcctttttccttagctgggatt

SEQ ID NO: 24963 - RNA, 22 nt, synthetic construct
  source 1..22: mol_type = other RNA
tcgcattcaaagctgtcctggg

SEQ ID NO: 24964 - RNA, 22 nt, synthetic construct
  source 1..22: mol_type = other RNA
tcgcgaaaccagacagattggt

SEQ ID NO: 24965 - RNA, 22 nt, synthetic construct
  source 1..22: mol_type = other RNA
tcgcgagacaccaggctaccca

SEQ ID NO: 24966 - RNA, 22 nt, synthetic construct
  source 1..22: mol_type = other RNA
tcgctcactccatttacttaaa

SEQ ID NO: 24967 - RNA, 22 nt, synthetic construct
  source 1..22: mol_type = other RNA
tcggcttccctgggccacactg

SEQ ID NO: 24968 - RNA, 22 nt, synthetic construct
  source 1..22: mol_type = other RNA
tcgtaaactttcttaaagtttt

SEQ ID NO: 24969 - RNA, 22 nt, synthetic construct
  source 1..22: mol_type = other RNA
tcgtgaatgtgatgcataaggt

SEQ ID NO: 24970 - RNA, 22 nt, synthetic construct
  source 1..22: mol_type = other RNA
tctaaatacctctcatttctgt

SEQ ID NO: 24971 - RNA, 22 nt, synthetic construct
  source 1..22: mol_type = other RNA
tctaacccgcgggccgcatggg

SEQ ID NO: 24972 - RNA, 22 nt, synthetic construct
  source 1..22: mol_type = other RNA
tctaagcatcatatcttgagtt

SEQ ID NO: 24973 - RNA, 22 nt, synthetic construct
  source 1..22: mol_type = other RNA
tctaatttgaattgcaactgtg

SEQ ID NO: 24974 - RNA, 22 nt, synthetic construct
  source 1..22: mol_type = other RNA
tctacccctttgcatccctacc

SEQ ID NO: 24975 - RNA, 22 nt, synthetic construct
  source 1..22: mol_type = other RNA
tctagaaaaatgctccaaaaat

SEQ ID NO: 24976 - RNA, 22 nt, synthetic construct
  source 1..22: mol_type = other RNA
tctagagacagacataaagcat

SEQ ID NO: 24977 - RNA, 22 nt, synthetic construct
  source 1..22: mol_type = other RNA
tctagccaactttaagtaaatg

SEQ ID NO: 24978 - RNA, 22 nt, synthetic construct
  source 1..22: mol_type = other RNA
tctagtattcagacatagcact

SEQ ID NO: 24979 - RNA, 22 nt, synthetic construct
  source 1..22: mol_type = other RNA
tctataactcaagatatgatgc

SEQ ID NO: 24980 - RNA, 22 nt, synthetic construct
  source 1..22: mol_type = other RNA
tctatccagggaccttatgcat

SEQ ID NO: 24981 - RNA, 22 nt, synthetic construct
  source 1..22: mol_type = other RNA
tctatcttcctttaggacaatc

SEQ ID NO: 24982 - RNA, 22 nt, synthetic construct
  source 1..22: mol_type = other RNA
tctatgacccaaactgcccttt

SEQ ID NO: 24983 - RNA, 22 nt, synthetic construct
  source 1..22: mol_type = other RNA
tctatgatttgggtaactgcaa

SEQ ID NO: 24984 - RNA, 22 nt, synthetic construct
  source 1..22: mol_type = other RNA
tctattaagatttaacctgatg

SEQ ID NO: 24985 - RNA, 22 nt, synthetic construct
  source 1..22: mol_type = other RNA
tctcaaatggtataaaactcag

SEQ ID NO: 24986 - RNA, 22 nt, synthetic construct
  source 1..22: mol_type = other RNA
tctcacctccctaaaattcatt

SEQ ID NO: 24987 - RNA, 22 nt, synthetic construct
  source 1..22: mol_type = other RNA
tctcactcatacttgatcccat

SEQ ID NO: 24988 - RNA, 22 nt, synthetic construct
  source 1..22: mol_type = other RNA
tctcagatgcctgtgtgatagc

SEQ ID NO: 24989 - RNA, 22 nt, synthetic construct
  source 1..22: mol_type = other RNA
tctcatttctgttcttaccagt

SEQ ID NO: 24990 - RNA, 22 nt, synthetic construct
  source 1..22: mol_type = other RNA
tctccccaggctctctacccct

SEQ ID NO: 24991 - RNA, 22 nt, synthetic construct
  source 1..22: mol_type = other RNA
tctcccctttggtcatgccttc

SEQ ID NO: 24992 - RNA, 22 nt, synthetic construct
  source 1..22: mol_type = other RNA
tctccctctcttgatcttgggt

SEQ ID NO: 24993 - RNA, 22 nt, synthetic construct
  source 1..22: mol_type = other RNA
tctccctttttcttcctctaaa

SEQ ID NO: 24994 - RNA, 22 nt, synthetic construct
  source 1..22: mol_type = other RNA
tctcctgaagtcacatggaatg

SEQ ID NO: 24995 - RNA, 22 nt, synthetic construct
  source 1..22: mol_type = other RNA
tctcgcgaaaccagacagattg

SEQ ID NO: 24996 - RNA, 22 nt, synthetic construct
  source 1..22: mol_type = other RNA
tctcgtgaatgtgatgcataag

SEQ ID NO: 24997 - RNA, 22 nt, synthetic construct
  source 1..22: mol_type = other RNA
tctctacccctttgcatcccta

SEQ ID NO: 24998 - RNA, 22 nt, synthetic construct
  source 1..22: mol_type = other RNA
tctctagaaaaatgctccaaaa

SEQ ID NO: 24999 - RNA, 22 nt, synthetic construct
  source 1..22: mol_type = other RNA
tctctatgatttgggtaactgc

SEQ ID NO: 25000 - RNA, 22 nt, synthetic construct
  source 1..22: mol_type = other RNA
tctctccccaggctctctaccc

SEQ ID NO: 25001 - RNA, 22 nt, synthetic construct
  source 1..22: mol_type = other RNA
tctctcctgaagtcacatggaa

SEQ ID NO: 25002 - RNA, 22 nt, synthetic construct
  source 1..22: mol_type = other RNA
tctctggcccattacatttcat

SEQ ID NO: 25003 - RNA, 22 nt, synthetic construct
  source 1..22: mol_type = other RNA
tctctgtaaagcagtagtcaag

SEQ ID NO: 25004 - RNA, 22 nt, synthetic construct
  source 1..22: mol_type = other RNA
tctctgtctttagtgttatctt

SEQ ID NO: 25005 - RNA, 22 nt, synthetic construct
  source 1..22: mol_type = other RNA
tctcttgatcttgggtagcctg

SEQ ID NO: 25006 - RNA, 22 nt, synthetic construct
  source 1..22: mol_type = other RNA
tctctttttactgagcagtaag

SEQ ID NO: 25007 - RNA, 22 nt, synthetic construct
  source 1..22: mol_type = other RNA
tctgaatactagaggagcaagt

SEQ ID NO: 25008 - RNA, 22 nt, synthetic construct
  source 1..22: mol_type = other RNA
tctgactcctgagcagtttgta

SEQ ID NO: 25009 - RNA, 22 nt, synthetic construct
  source 1..22: mol_type = other RNA
tctgagatcagttactaactgg

SEQ ID NO: 25010 - RNA, 22 nt, synthetic construct
  source 1..22: mol_type = other RNA
tctgagctttttgaaggaatag

SEQ ID NO: 25011 - RNA, 22 nt, synthetic construct
  source 1..22: mol_type = other RNA
tctgaggttaggcaacatctcc

SEQ ID NO: 25012 - RNA, 22 nt, synthetic construct
  source 1..22: mol_type = other RNA
tctgatatatttaactatgtag

SEQ ID NO: 25013 - RNA, 22 nt, synthetic construct
  source 1..22: mol_type = other RNA
tctgatgtctagccaactttaa

SEQ ID NO: 25014 - RNA, 22 nt, synthetic construct
  source 1..22: mol_type = other RNA
tctgcaggattaaaagcagcaa

SEQ ID NO: 25015 - RNA, 22 nt, synthetic construct
  source 1..22: mol_type = other RNA
tctggcccattacatttcattt

SEQ ID NO: 25016 - RNA, 22 nt, synthetic construct
  source 1..22: mol_type = other RNA
tctggggttgttgtcattgctg

SEQ ID NO: 25017 - RNA, 22 nt, synthetic construct
  source 1..22: mol_type = other RNA
tctggtttcgcgagacaccagg

SEQ ID NO: 25018 - RNA, 22 nt, synthetic construct
  source 1..22: mol_type = other RNA
tctgtaaagcagtagtcaagat

SEQ ID NO: 25019 - RNA, 22 nt, synthetic construct
  source 1..22: mol_type = other RNA
tctgtaatccacagaacaagtc

SEQ ID NO: 25020 - RNA, 22 nt, synthetic construct
  source 1..22: mol_type = other RNA
tctgtccctgaccgtcttcaca

SEQ ID NO: 25021 - RNA, 22 nt, synthetic construct
  source 1..22: mol_type = other RNA
tctgtcctacaagttttcactt

SEQ ID NO: 25022 - RNA, 22 nt, synthetic construct
  source 1..22: mol_type = other RNA
tctgtctctagaaaaatgctcc

SEQ ID NO: 25023 - RNA, 22 nt, synthetic construct
  source 1..22: mol_type = other RNA
tctgtctggtttcgcgagacac

SEQ ID NO: 25024 - RNA, 22 nt, synthetic construct
  source 1..22: mol_type = other RNA
tctgtctttagtgttatctttt

SEQ ID NO: 25025 - RNA, 22 nt, synthetic construct
  source 1..22: mol_type = other RNA
tctgtggattacagaatacgtg

SEQ ID NO: 25026 - RNA, 22 nt, synthetic construct
  source 1..22: mol_type = other RNA
tctgtgtgatacaaatgaaccc

SEQ ID NO: 25027 - RNA, 22 nt, synthetic construct
  source 1..22: mol_type = other RNA
tctgttctcgtgaatgtgatgc

SEQ ID NO: 25028 - RNA, 22 nt, synthetic construct
  source 1..22: mol_type = other RNA
tctgttcttaccagttagtaac

SEQ ID NO: 25029 - RNA, 22 nt, synthetic construct
  source 1..22: mol_type = other RNA
tctgttgttctatgacccaaac

SEQ ID NO: 25030 - RNA, 22 nt, synthetic construct
  source 1..22: mol_type = other RNA
tcttacatcttgttaggatgat

SEQ ID NO: 25031 - RNA, 22 nt, synthetic construct
  source 1..22: mol_type = other RNA
tcttaccagttagtaactgatc

SEQ ID NO: 25032 - RNA, 22 nt, synthetic construct
  source 1..22: mol_type = other RNA
tcttacccagcagtgcttttat

SEQ ID NO: 25033 - RNA, 22 nt, synthetic construct
  source 1..22: mol_type = other RNA
tcttagcaactctcactcatac

SEQ ID NO: 25034 - RNA, 22 nt, synthetic construct
  source 1..22: mol_type = other RNA
tcttcacagtccaggtgatctt

SEQ ID NO: 25035 - RNA, 22 nt, synthetic construct
  source 1..22: mol_type = other RNA
tcttcctctaaatacctctcat

SEQ ID NO: 25036 - RNA, 22 nt, synthetic construct
  source 1..22: mol_type = other RNA
tcttcctttaggacaatcatcc

SEQ ID NO: 25037 - RNA, 22 nt, synthetic construct
  source 1..22: mol_type = other RNA
tcttctgactcctgagcagttt

SEQ ID NO: 25038 - RNA, 22 nt, synthetic construct
  source 1..22: mol_type = other RNA
tcttgactactgctttacagag

SEQ ID NO: 25039 - RNA, 22 nt, synthetic construct
  source 1..22: mol_type = other RNA
tcttgagcattggaaaagtggc

SEQ ID NO: 25040 - RNA, 22 nt, synthetic construct
  source 1..22: mol_type = other RNA
tcttgagttatagaaaacaatc

SEQ ID NO: 25041 - RNA, 22 nt, synthetic construct
  source 1..22: mol_type = other RNA
tcttgatcttgggtagcctggt

SEQ ID NO: 25042 - RNA, 22 nt, synthetic construct
  source 1..22: mol_type = other RNA
tcttgcagtgtggcccagggaa

SEQ ID NO: 25043 - RNA, 22 nt, synthetic construct
  source 1..22: mol_type = other RNA
tcttgggccacatataaaggac

SEQ ID NO: 25044 - RNA, 22 nt, synthetic construct
  source 1..22: mol_type = other RNA
tcttgggtagcctggtgtctcg

SEQ ID NO: 25045 - RNA, 22 nt, synthetic construct
  source 1..22: mol_type = other RNA
tcttgtactcctgagctcctag

SEQ ID NO: 25046 - RNA, 22 nt, synthetic construct
  source 1..22: mol_type = other RNA
tcttgttaggatgattgtccta

SEQ ID NO: 25047 - RNA, 22 nt, synthetic construct
  source 1..22: mol_type = other RNA
tctttaaaaatggtttgttgga

SEQ ID NO: 25048 - RNA, 22 nt, synthetic construct
  source 1..22: mol_type = other RNA
tctttagtcataccagccactt

SEQ ID NO: 25049 - RNA, 22 nt, synthetic construct
  source 1..22: mol_type = other RNA
tctttagtgttatcttttgatc

SEQ ID NO: 25050 - RNA, 22 nt, synthetic construct
  source 1..22: mol_type = other RNA
tctttcggcttccctgggccac

SEQ ID NO: 25051 - RNA, 22 nt, synthetic construct
  source 1..22: mol_type = other RNA
tctttgtggggtggttcttttt

SEQ ID NO: 25052 - RNA, 22 nt, synthetic construct
  source 1..22: mol_type = other RNA
tcttttgatccatcttacatct

SEQ ID NO: 25053 - RNA, 22 nt, synthetic construct
  source 1..22: mol_type = other RNA
tctttttactgagcagtaagga

SEQ ID NO: 25054 - RNA, 22 nt, synthetic construct
  source 1..22: mol_type = other RNA
tctttttggaatgctacccttg

SEQ ID NO: 25055 - RNA, 22 nt, synthetic construct
  source 1..22: mol_type = other RNA
tgaaaaagctgttaaattgagg

SEQ ID NO: 25056 - RNA, 22 nt, synthetic construct
  source 1..22: mol_type = other RNA
tgaaaaatgaaaaagctgttaa

SEQ ID NO: 25057 - RNA, 22 nt, synthetic construct
  source 1..22: mol_type = other RNA
tgaaaacttgtaggacagaaat

SEQ ID NO: 25058 - RNA, 22 nt, synthetic construct
  source 1..22: mol_type = other RNA
tgaaaatcaagataaacattta

SEQ ID NO: 25059 - RNA, 22 nt, synthetic construct
  source 1..22: mol_type = other RNA
tgaaaatgacaggtgaaactcc

SEQ ID NO: 25060 - RNA, 22 nt, synthetic construct
  source 1..22: mol_type = other RNA
tgaaactccattactggcttgt

SEQ ID NO: 25061 - RNA, 22 nt, synthetic construct
  source 1..22: mol_type = other RNA
tgaaagcaagcgttaatgagtt

SEQ ID NO: 25062 - RNA, 22 nt, synthetic construct
  source 1..22: mol_type = other RNA
tgaaagctaagtccaacaaacc

SEQ ID NO: 25063 - RNA, 22 nt, synthetic construct
  source 1..22: mol_type = other RNA
tgaaatccaaactcattaacgc

SEQ ID NO: 25064 - RNA, 22 nt, synthetic construct
  source 1..22: mol_type = other RNA
tgaaatgtaatgggccagagag

SEQ ID NO: 25065 - RNA, 22 nt, synthetic construct
  source 1..22: mol_type = other RNA
tgaacccagcctaaatttctgt

SEQ ID NO: 25066 - RNA, 22 nt, synthetic construct
  source 1..22: mol_type = other RNA
tgaactagggaggaataaaagc

SEQ ID NO: 25067 - RNA, 22 nt, synthetic construct
  source 1..22: mol_type = other RNA
tgaagaataggtctgtgtgata

SEQ ID NO: 25068 - RNA, 22 nt, synthetic construct
  source 1..22: mol_type = other RNA
tgaagacggtcagggacagaat

SEQ ID NO: 25069 - RNA, 22 nt, synthetic construct
  source 1..22: mol_type = other RNA
tgaagctctctggcccattaca

SEQ ID NO: 25070 - RNA, 22 nt, synthetic construct
  source 1..22: mol_type = other RNA
tgaaggaatagtgtcttgtact

SEQ ID NO: 25071 - RNA, 22 nt, synthetic construct
  source 1..22: mol_type = other RNA
tgaagtcacatggaatgaattg

SEQ ID NO: 25072 - RNA, 22 nt, synthetic construct
  source 1..22: mol_type = other RNA
tgaatactagaggagcaagtac

SEQ ID NO: 25073 - RNA, 22 nt, synthetic construct
  source 1..22: mol_type = other RNA
tgaatctgcaggattaaaagca

SEQ ID NO: 25074 - RNA, 22 nt, synthetic construct
  source 1..22: mol_type = other RNA
tgaatgaagaataggtctgtgt

SEQ ID NO: 25075 - RNA, 22 nt, synthetic construct
  source 1..22: mol_type = other RNA
tgaatgtgatgcataaggtccc

SEQ ID NO: 25076 - RNA, 22 nt, synthetic construct
  source 1..22: mol_type = other RNA
tgaattctgttctcgtgaatgt

SEQ ID NO: 25077 - RNA, 22 nt, synthetic construct
  source 1..22: mol_type = other RNA
tgaattgcaactgtggacagta

SEQ ID NO: 25078 - RNA, 22 nt, synthetic construct
  source 1..22: mol_type = other RNA
tgaattgcagttacccaaatca

SEQ ID NO: 25079 - RNA, 22 nt, synthetic construct
  source 1..22: mol_type = other RNA
tgaattttagggaggtgagatt

SEQ ID NO: 25080 - RNA, 22 nt, synthetic construct
  source 1..22: mol_type = other RNA
tgacaacaaccccagaattact

SEQ ID NO: 25081 - RNA, 22 nt, synthetic construct
  source 1..22: mol_type = other RNA
tgacaggtgaaactccattact

SEQ ID NO: 25082 - RNA, 22 nt, synthetic construct
  source 1..22: mol_type = other RNA
tgacatttgaatctgcaggatt

SEQ ID NO: 25083 - RNA, 22 nt, synthetic construct
  source 1..22: mol_type = other RNA
tgacattttattaatcttgagc

SEQ ID NO: 25084 - RNA, 22 nt, synthetic construct
  source 1..22: mol_type = other RNA
tgaccaaaggggagatgacatt

SEQ ID NO: 25085 - RNA, 22 nt, synthetic construct
  source 1..22: mol_type = other RNA
tgacccaaactgcccttttaaa

SEQ ID NO: 25086 - RNA, 22 nt, synthetic construct
  source 1..22: mol_type = other RNA
tgacccacgcagtacaaactgc

SEQ ID NO: 25087 - RNA, 22 nt, synthetic construct
  source 1..22: mol_type = other RNA
tgaccgtcttcacagtccaggt

SEQ ID NO: 25088 - RNA, 22 nt, synthetic construct
  source 1..22: mol_type = other RNA
tgacctctctcctgaagtcaca

SEQ ID NO: 25089 - RNA, 22 nt, synthetic construct
  source 1..22: mol_type = other RNA
tgacgtctctatgatttgggta

SEQ ID NO: 25090 - RNA, 22 nt, synthetic construct
  source 1..22: mol_type = other RNA
tgactactgctttacagagaat

SEQ ID NO: 25091 - RNA, 22 nt, synthetic construct
  source 1..22: mol_type = other RNA
tgactcctgagcagtttgtact

SEQ ID NO: 25092 - RNA, 22 nt, synthetic construct
  source 1..22: mol_type = other RNA
tgactcttacccagcagtgctt

SEQ ID NO: 25093 - RNA, 22 nt, synthetic construct
  source 1..22: mol_type = other RNA
tgacttcaggagagaggtcata

SEQ ID NO: 25094 - RNA, 22 nt, synthetic construct
  source 1..22: mol_type = other RNA
tgagaaaccagtgcttccctcc

SEQ ID NO: 25095 - RNA, 22 nt, synthetic construct
  source 1..22: mol_type = other RNA
tgagacccttgctgcaccacca

SEQ ID NO: 25096 - RNA, 22 nt, synthetic construct
  source 1..22: mol_type = other RNA
tgagaggtatttagaggaagaa

SEQ ID NO: 25097 - RNA, 22 nt, synthetic construct
  source 1..22: mol_type = other RNA
tgagagttgctaagatgcctgg

SEQ ID NO: 25098 - RNA, 22 nt, synthetic construct
  source 1..22: mol_type = other RNA
tgagatcagttactaactggta

SEQ ID NO: 25099 - RNA, 22 nt, synthetic construct
  source 1..22: mol_type = other RNA
tgagattccattaaactgttac

SEQ ID NO: 25100 - RNA, 22 nt, synthetic construct
  source 1..22: mol_type = other RNA
tgagcagtaaggaaataaaagc

SEQ ID NO: 25101 - RNA, 22 nt, synthetic construct
  source 1..22: mol_type = other RNA
tgagcagtttgtactgcgtggg

SEQ ID NO: 25102 - RNA, 22 nt, synthetic construct
  source 1..22: mol_type = other RNA
tgagcattggaaaagtggctgg

SEQ ID NO: 25103 - RNA, 22 nt, synthetic construct
  source 1..22: mol_type = other RNA
tgagcgacatgtaaatgtcttt

SEQ ID NO: 25104 - RNA, 22 nt, synthetic construct
  source 1..22: mol_type = other RNA
tgagctcctagtatactctgat

SEQ ID NO: 25105 - RNA, 22 nt, synthetic construct
  source 1..22: mol_type = other RNA
tgagctggggcttgactcttac

SEQ ID NO: 25106 - RNA, 22 nt, synthetic construct
  source 1..22: mol_type = other RNA
tgagctttttgaaggaatagtg

SEQ ID NO: 25107 - RNA, 22 nt, synthetic construct
  source 1..22: mol_type = other RNA
tgaggaaagtctatccagggac

SEQ ID NO: 25108 - RNA, 22 nt, synthetic construct
  source 1..22: mol_type = other RNA
tgaggaattataataccaacat

SEQ ID NO: 25109 - RNA, 22 nt, synthetic construct
  source 1..22: mol_type = other RNA
tgagggagggaagcactggttt

SEQ ID NO: 25110 - RNA, 22 nt, synthetic construct
  source 1..22: mol_type = other RNA
tgaggttaggcaacatctccct

SEQ ID NO: 25111 - RNA, 22 nt, synthetic construct
  source 1..22: mol_type = other RNA
tgagtgagagttgctaagatgc

SEQ ID NO: 25112 - RNA, 22 nt, synthetic construct
  source 1..22: mol_type = other RNA
tgagttatagaaaacaatcaca

SEQ ID NO: 25113 - RNA, 22 nt, synthetic construct
  source 1..22: mol_type = other RNA
tgagttttataccatttgagac

SEQ ID NO: 25114 - RNA, 22 nt, synthetic construct
  source 1..22: mol_type = other RNA
tgataagtagtgataatccgca

SEQ ID NO: 25115 - RNA, 22 nt, synthetic construct
  source 1..22: mol_type = other RNA
tgatacaaatgaacccagccta

SEQ ID NO: 25116 - RNA, 22 nt, synthetic construct
  source 1..22: mol_type = other RNA
tgatagcttccaaattgctgtc

SEQ ID NO: 25117 - RNA, 22 nt, synthetic construct
  source 1..22: mol_type = other RNA
tgatatatttaactatgtagct

SEQ ID NO: 25118 - RNA, 22 nt, synthetic construct
  source 1..22: mol_type = other RNA
tgatcacctgagttttatacca

SEQ ID NO: 25119 - RNA, 22 nt, synthetic construct
  source 1..22: mol_type = other RNA
tgatcatgctttatgtctgtct

SEQ ID NO: 25120 - RNA, 22 nt, synthetic construct
  source 1..22: mol_type = other RNA
tgatccatcttacatcttgtta

SEQ ID NO: 25121 - RNA, 22 nt, synthetic construct
  source 1..22: mol_type = other RNA
tgatcccattttccatttgttg

SEQ ID NO: 25122 - RNA, 22 nt, synthetic construct
  source 1..22: mol_type = other RNA
tgatctcagatgcctgtgtgat

SEQ ID NO: 25123 - RNA, 22 nt, synthetic construct
  source 1..22: mol_type = other RNA
tgatcttgactactgctttaca

SEQ ID NO: 25124 - RNA, 22 nt, synthetic construct
  source 1..22: mol_type = other RNA
tgatcttgggtagcctggtgtc

SEQ ID NO: 25125 - RNA, 22 nt, synthetic construct
  source 1..22: mol_type = other RNA
tgatgcataaggtccctggata

SEQ ID NO: 25126 - RNA, 22 nt, synthetic construct
  source 1..22: mol_type = other RNA
tgatgctacactttggtggtgc

SEQ ID NO: 25127 - RNA, 22 nt, synthetic construct
  source 1..22: mol_type = other RNA
tgatgcttagagctcctccaat

SEQ ID NO: 25128 - RNA, 22 nt, synthetic construct
  source 1..22: mol_type = other RNA
tgatggttttctctttttactg

SEQ ID NO: 25129 - RNA, 22 nt, synthetic construct
  source 1..22: mol_type = other RNA
tgatgtctagccaactttaagt

SEQ ID NO: 25130 - RNA, 22 nt, synthetic construct
  source 1..22: mol_type = other RNA
tgattggaggagctctaagcat

SEQ ID NO: 25131 - RNA, 22 nt, synthetic construct
  source 1..22: mol_type = other RNA
tgattgtcctaaaggaagatag

SEQ ID NO: 25132 - RNA, 22 nt, synthetic construct
  source 1..22: mol_type = other RNA
tgattgttttctataactcaag

SEQ ID NO: 25133 - RNA, 22 nt, synthetic construct
  source 1..22: mol_type = other RNA
tgatttaaattaccttaactat

SEQ ID NO: 25134 - RNA, 22 nt, synthetic construct
  source 1..22: mol_type = other RNA
tgatttgggtaactgcaattca

SEQ ID NO: 25135 - RNA, 22 nt, synthetic construct
  source 1..22: mol_type = other RNA
tgattttcattttatccttttt

SEQ ID NO: 25136 - RNA, 22 nt, synthetic construct
  source 1..22: mol_type = other RNA
tgcaaaggggtagagagcctgg

SEQ ID NO: 25137 - RNA, 22 nt, synthetic construct
  source 1..22: mol_type = other RNA
tgcaacgagactgcggattatc

SEQ ID NO: 25138 - RNA, 22 nt, synthetic construct
  source 1..22: mol_type = other RNA
tgcaactgtggacagtatagct

SEQ ID NO: 25139 - RNA, 22 nt, synthetic construct
  source 1..22: mol_type = other RNA
tgcaagaactgtcttgggccac

SEQ ID NO: 25140 - RNA, 22 nt, synthetic construct
  source 1..22: mol_type = other RNA
tgcaattcattccatgtgactt

SEQ ID NO: 25141 - RNA, 22 nt, synthetic construct
  source 1..22: mol_type = other RNA
tgcaccaccaaagtgtagcatc

SEQ ID NO: 25142 - RNA, 22 nt, synthetic construct
  source 1..22: mol_type = other RNA
tgcagattcaaatgtcatctcc

SEQ ID NO: 25143 - RNA, 22 nt, synthetic construct
  source 1..22: mol_type = other RNA
tgcagcaagggtctcaaatggt

SEQ ID NO: 25144 - RNA, 22 nt, synthetic construct
  source 1..22: mol_type = other RNA
tgcaggattaaaagcagcaagg

SEQ ID NO: 25145 - RNA, 22 nt, synthetic construct
  source 1..22: mol_type = other RNA
tgcagtgtggcccagggaagcc

SEQ ID NO: 25146 - RNA, 22 nt, synthetic construct
  source 1..22: mol_type = other RNA
tgcagttacccaaatcatagag

SEQ ID NO: 25147 - RNA, 22 nt, synthetic construct
  source 1..22: mol_type = other RNA
tgcataaggtccctggatagac

SEQ ID NO: 25148 - RNA, 22 nt, synthetic construct
  source 1..22: mol_type = other RNA
tgcataatgaattttagggagg

SEQ ID NO: 25149 - RNA, 22 nt, synthetic construct
  source 1..22: mol_type = other RNA
tgcatcacattcacgagaacag

SEQ ID NO: 25150 - RNA, 22 nt, synthetic construct
  source 1..22: mol_type = other RNA
tgcatccctaccaggcatctta

SEQ ID NO: 25151 - RNA, 22 nt, synthetic construct
  source 1..22: mol_type = other RNA
tgcccttttaaaaaagcagttt

SEQ ID NO: 25152 - RNA, 22 nt, synthetic construct
  source 1..22: mol_type = other RNA
tgcctaacctcagatccaattc

SEQ ID NO: 25153 - RNA, 22 nt, synthetic construct
  source 1..22: mol_type = other RNA
tgcctgccttggacaacagtga

SEQ ID NO: 25154 - RNA, 22 nt, synthetic construct
  source 1..22: mol_type = other RNA
tgcctggtagggatgcaaaggg

SEQ ID NO: 25155 - RNA, 22 nt, synthetic construct
  source 1..22: mol_type = other RNA
tgcctgtgtgatagcttccaaa

SEQ ID NO: 25156 - RNA, 22 nt, synthetic construct
  source 1..22: mol_type = other RNA
tgccttccatggtctgttgttc

SEQ ID NO: 25157 - RNA, 22 nt, synthetic construct
  source 1..22: mol_type = other RNA
tgccttggacaacagtgaaagc

SEQ ID NO: 25158 - RNA, 22 nt, synthetic construct
  source 1..22: mol_type = other RNA
tgcggattatcactacttatca

SEQ ID NO: 25159 - RNA, 22 nt, synthetic construct
  source 1..22: mol_type = other RNA
tgcggcccgcgggttagacaac

SEQ ID NO: 25160 - RNA, 22 nt, synthetic construct
  source 1..22: mol_type = other RNA
tgcgtgggtcatagtaattctg

SEQ ID NO: 25161 - RNA, 22 nt, synthetic construct
  source 1..22: mol_type = other RNA
tgctaagatgcctggtagggat

SEQ ID NO: 25162 - RNA, 22 nt, synthetic construct
  source 1..22: mol_type = other RNA
tgctacactttggtggtgcagc

SEQ ID NO: 25163 - RNA, 22 nt, synthetic construct
  source 1..22: mol_type = other RNA
tgctacccttgctgcttttaat

SEQ ID NO: 25164 - RNA, 22 nt, synthetic construct
  source 1..22: mol_type = other RNA
tgctatgtctgaatactagagg

SEQ ID NO: 25165 - RNA, 22 nt, synthetic construct
  source 1..22: mol_type = other RNA
tgctcaagattaataaaatgtc

SEQ ID NO: 25166 - RNA, 22 nt, synthetic construct
  source 1..22: mol_type = other RNA
tgctcaggagtcagaagaaaac

SEQ ID NO: 25167 - RNA, 22 nt, synthetic construct
  source 1..22: mol_type = other RNA
tgctcagtaaaaagagaaaacc

SEQ ID NO: 25168 - RNA, 22 nt, synthetic construct
  source 1..22: mol_type = other RNA
tgctcatcagctgtcctttata

SEQ ID NO: 25169 - RNA, 22 nt, synthetic construct
  source 1..22: mol_type = other RNA
tgctccaaaaatgataagtagt

SEQ ID NO: 25170 - RNA, 22 nt, synthetic construct
  source 1..22: mol_type = other RNA
tgctcctctagtattcagacat

SEQ ID NO: 25171 - RNA, 22 nt, synthetic construct
  source 1..22: mol_type = other RNA
tgctctatcttcctttaggaca

SEQ ID NO: 25172 - RNA, 22 nt, synthetic construct
  source 1..22: mol_type = other RNA
tgctgatttaaattaccttaac

SEQ ID NO: 25173 - RNA, 22 nt, synthetic construct
  source 1..22: mol_type = other RNA
tgctgcaccaccaaagtgtagc

SEQ ID NO: 25174 - RNA, 22 nt, synthetic construct
  source 1..22: mol_type = other RNA
tgctgcttttaatcctgcagat

SEQ ID NO: 25175 - RNA, 22 nt, synthetic construct
  source 1..22: mol_type = other RNA
tgctgggtaagagtcaagcccc

SEQ ID NO: 25176 - RNA, 22 nt, synthetic construct
  source 1..22: mol_type = other RNA
tgctgtaaacagtacaagccag

SEQ ID NO: 25177 - RNA, 22 nt, synthetic construct
  source 1..22: mol_type = other RNA
tgctgtctctgtctttagtgtt

SEQ ID NO: 25178 - RNA, 22 nt, synthetic construct
  source 1..22: mol_type = other RNA
tgcttagagctcctccaatcaa

SEQ ID NO: 25179 - RNA, 22 nt, synthetic construct
  source 1..22: mol_type = other RNA
tgcttccctccctcaccctctc

SEQ ID NO: 25180 - RNA, 22 nt, synthetic construct
  source 1..22: mol_type = other RNA
tgcttgagaaaccagtgcttcc

SEQ ID NO: 25181 - RNA, 22 nt, synthetic construct
  source 1..22: mol_type = other RNA
tgctttacagagaattggatct

SEQ ID NO: 25182 - RNA, 22 nt, synthetic construct
  source 1..22: mol_type = other RNA
tgctttatgtctgtctctagaa

SEQ ID NO: 25183 - RNA, 22 nt, synthetic construct
  source 1..22: mol_type = other RNA
tgctttcactgttgtccaaggc

SEQ ID NO: 25184 - RNA, 22 nt, synthetic construct
  source 1..22: mol_type = other RNA
tgcttttaatcctgcagattca

SEQ ID NO: 25185 - RNA, 22 nt, synthetic construct
  source 1..22: mol_type = other RNA
tgcttttattcctccctagttc

SEQ ID NO: 25186 - RNA, 22 nt, synthetic construct
  source 1..22: mol_type = other RNA
tgcttttttaaaagggcagttt

SEQ ID NO: 25187 - RNA, 22 nt, synthetic construct
  source 1..22: mol_type = other RNA
tggaaaagtggctggtatgact

SEQ ID NO: 25188 - RNA, 22 nt, synthetic construct
  source 1..22: mol_type = other RNA
tggaaaatagtgaaaaatgaaa

SEQ ID NO: 25189 - RNA, 22 nt, synthetic construct
  source 1..22: mol_type = other RNA
tggaaaatgggatcaagtatga

SEQ ID NO: 25190 - RNA, 22 nt, synthetic construct
  source 1..22: mol_type = other RNA
tggaaacacttgattggaggag

SEQ ID NO: 25191 - RNA, 22 nt, synthetic construct
  source 1..22: mol_type = other RNA
tggaaccaatctgtctggtttc

SEQ ID NO: 25192 - RNA, 22 nt, synthetic construct
  source 1..22: mol_type = other RNA
tggaagctatcacacaggcatc

SEQ ID NO: 25193 - RNA, 22 nt, synthetic construct
  source 1..22: mol_type = other RNA
tggaaggcatgaccaaagggga

SEQ ID NO: 25194 - RNA, 22 nt, synthetic construct
  source 1..22: mol_type = other RNA
tggaatctcacctccctaaaat

SEQ ID NO: 25195 - RNA, 22 nt, synthetic construct
  source 1..22: mol_type = other RNA
tggaatgaattgcagttaccca

SEQ ID NO: 25196 - RNA, 22 nt, synthetic construct
  source 1..22: mol_type = other RNA
tggaatgctacccttgctgctt

SEQ ID NO: 25197 - RNA, 22 nt, synthetic construct
  source 1..22: mol_type = other RNA
tggacaacagtgaaagcaagcg

SEQ ID NO: 25198 - RNA, 22 nt, synthetic construct
  source 1..22: mol_type = other RNA
tggacacccctggtttacagga

SEQ ID NO: 25199 - RNA, 22 nt, synthetic construct
  source 1..22: mol_type = other RNA
tggacagtatagctgtagcccc

SEQ ID NO: 25200 - RNA, 22 nt, synthetic construct
  source 1..22: mol_type = other RNA
tggacattgatggttttctctt

SEQ ID NO: 25201 - RNA, 22 nt, synthetic construct
  source 1..22: mol_type = other RNA
tggactgtgaagacggtcaggg

SEQ ID NO: 25202 - RNA, 22 nt, synthetic construct
  source 1..22: mol_type = other RNA
tggacttagctttcagctaaat

SEQ ID NO: 25203 - RNA, 22 nt, synthetic construct
  source 1..22: mol_type = other RNA
tggagcatttttctagagacag

SEQ ID NO: 25204 - RNA, 22 nt, synthetic construct
  source 1..22: mol_type = other RNA
tggaggagctctaagcatcata

SEQ ID NO: 25205 - RNA, 22 nt, synthetic construct
  source 1..22: mol_type = other RNA
tggagtgagcgacatgtaaatg

SEQ ID NO: 25206 - RNA, 22 nt, synthetic construct
  source 1..22: mol_type = other RNA
tggagtttcacctgtcattttc

SEQ ID NO: 25207 - RNA, 22 nt, synthetic construct
  source 1..22: mol_type = other RNA
tggatagactttcctcaattta

SEQ ID NO: 25208 - RNA, 22 nt, synthetic construct
  source 1..22: mol_type = other RNA
tggatcaaaagataacactaaa

SEQ ID NO: 25209 - RNA, 22 nt, synthetic construct
  source 1..22: mol_type = other RNA
tggatctgaggttaggcaacat

SEQ ID NO: 25210 - RNA, 22 nt, synthetic construct
  source 1..22: mol_type = other RNA
tggattacagaatacgtggaca

SEQ ID NO: 25211 - RNA, 22 nt, synthetic construct
  source 1..22: mol_type = other RNA
tggcccaagacagttcttgcag

SEQ ID NO: 25212 - RNA, 22 nt, synthetic construct
  source 1..22: mol_type = other RNA
tggcccattacatttcatttaa

SEQ ID NO: 25213 - RNA, 22 nt, synthetic construct
  source 1..22: mol_type = other RNA
tggctagacatcagagtatact

SEQ ID NO: 25214 - RNA, 22 nt, synthetic construct
  source 1..22: mol_type = other RNA
tggctggtatgactaaagaact

SEQ ID NO: 25215 - RNA, 22 nt, synthetic construct
  source 1..22: mol_type = other RNA
tggcttgtactgtttacagcaa

SEQ ID NO: 25216 - RNA, 22 nt, synthetic construct
  source 1..22: mol_type = other RNA
tgggacccaggacagctttgaa

SEQ ID NO: 25217 - RNA, 22 nt, synthetic construct
  source 1..22: mol_type = other RNA
tgggatcaagtatgagtgagag

SEQ ID NO: 25218 - RNA, 22 nt, synthetic construct
  source 1..22: mol_type = other RNA
tgggattctgtccctgaccgtc

SEQ ID NO: 25219 - RNA, 22 nt, synthetic construct
  source 1..22: mol_type = other RNA
tgggccacactgcaagaactgt

SEQ ID NO: 25220 - RNA, 22 nt, synthetic construct
  source 1..22: mol_type = other RNA
tgggccacatataaaggacagc

SEQ ID NO: 25221 - RNA, 22 nt, synthetic construct
  source 1..22: mol_type = other RNA
tgggccagagagcttcagcttt

SEQ ID NO: 25222 - RNA, 22 nt, synthetic construct
  source 1..22: mol_type = other RNA
tggggagagagggtgagggagg

SEQ ID NO: 25223 - RNA, 22 nt, synthetic construct
  source 1..22: mol_type = other RNA
tggggcttgactcttacccagc

SEQ ID NO: 25224 - RNA, 22 nt, synthetic construct
  source 1..22: mol_type = other RNA
tggggtggttctttttggaatg

SEQ ID NO: 25225 - RNA, 22 nt, synthetic construct
  source 1..22: mol_type = other RNA
tggggttgttgtcattgctgat

SEQ ID NO: 25226 - RNA, 22 nt, synthetic construct
  source 1..22: mol_type = other RNA
tgggtaactgcaattcattcca

SEQ ID NO: 25227 - RNA, 22 nt, synthetic construct
  source 1..22: mol_type = other RNA
tgggtaagagtcaagccccagc

SEQ ID NO: 25228 - RNA, 22 nt, synthetic construct
  source 1..22: mol_type = other RNA
tgggtagcctggtgtctcgcga

SEQ ID NO: 25229 - RNA, 22 nt, synthetic construct
  source 1..22: mol_type = other RNA
tgggtcatagaacaacagacca

SEQ ID NO: 25230 - RNA, 22 nt, synthetic construct
  source 1..22: mol_type = other RNA
tgggtcatagtaattctggggt

SEQ ID NO: 25231 - RNA, 22 nt, synthetic construct
  source 1..22: mol_type = other RNA
tgggtcccatgcggcccgcggg

SEQ ID NO: 25232 - RNA, 22 nt, synthetic construct
  source 1..22: mol_type = other RNA
tgggtcgcattcaaagctgtcc

SEQ ID NO: 25233 - RNA, 22 nt, synthetic construct
  source 1..22: mol_type = other RNA
tgggttcatttgtatcacacag

SEQ ID NO: 25234 - RNA, 22 nt, synthetic construct
  source 1..22: mol_type = other RNA
tggtaagaacagaaatgagagg

SEQ ID NO: 25235 - RNA, 22 nt, synthetic construct
  source 1..22: mol_type = other RNA
tggtagggatgcaaaggggtag

SEQ ID NO: 25236 - RNA, 22 nt, synthetic construct
  source 1..22: mol_type = other RNA
tggtataaaactcaggtgatca

SEQ ID NO: 25237 - RNA, 22 nt, synthetic construct
  source 1..22: mol_type = other RNA
tggtattataattcctcaggat

SEQ ID NO: 25238 - RNA, 22 nt, synthetic construct
  source 1..22: mol_type = other RNA
tggtcatgccttccatggtctg

SEQ ID NO: 25239 - RNA, 22 nt, synthetic construct
  source 1..22: mol_type = other RNA
tggtctgttgttctatgaccca

SEQ ID NO: 25240 - RNA, 22 nt, synthetic construct
  source 1..22: mol_type = other RNA
tggtgcagcaagggtctcaaat

SEQ ID NO: 25241 - RNA, 22 nt, synthetic construct
  source 1..22: mol_type = other RNA
tggtggaaccaatctgtctggt

SEQ ID NO: 25242 - RNA, 22 nt, synthetic construct
  source 1..22: mol_type = other RNA
tggtggtgcagcaagggtctca

SEQ ID NO: 25243 - RNA, 22 nt, synthetic construct
  source 1..22: mol_type = other RNA
tggtgtctcgcgaaaccagaca

SEQ ID NO: 25244 - RNA, 22 nt, synthetic construct
  source 1..22: mol_type = other RNA
tggtgttaaaatgttggtatta

SEQ ID NO: 25245 - RNA, 22 nt, synthetic construct
  source 1..22: mol_type = other RNA
tggttccaccacaaattaaggc

SEQ ID NO: 25246 - RNA, 22 nt, synthetic construct
  source 1..22: mol_type = other RNA
tggttctttttggaatgctacc

SEQ ID NO: 25247 - RNA, 22 nt, synthetic construct
  source 1..22: mol_type = other RNA
tggtttacaggatgaattctgt

SEQ ID NO: 25248 - RNA, 22 nt, synthetic construct
  source 1..22: mol_type = other RNA
tggtttcgcgagacaccaggct

SEQ ID NO: 25249 - RNA, 22 nt, synthetic construct
  source 1..22: mol_type = other RNA
tggtttctcaagcaaaagctaa

SEQ ID NO: 25250 - RNA, 22 nt, synthetic construct
  source 1..22: mol_type = other RNA
tggtttgacattttattaatct

SEQ ID NO: 25251 - RNA, 22 nt, synthetic construct
  source 1..22: mol_type = other RNA
tggtttgttggacttagctttc

SEQ ID NO: 25252 - RNA, 22 nt, synthetic construct
  source 1..22: mol_type = other RNA
tggttttctctttttactgagc

SEQ ID NO: 25253 - RNA, 22 nt, synthetic construct
  source 1..22: mol_type = other RNA
tgtaaacagtacaagccagtaa

SEQ ID NO: 25254 - RNA, 22 nt, synthetic construct
  source 1..22: mol_type = other RNA
tgtaaaccaggggtgtccaatc

SEQ ID NO: 25255 - RNA, 22 nt, synthetic construct
  source 1..22: mol_type = other RNA
tgtaaagcagtagtcaagatca

SEQ ID NO: 25256 - RNA, 22 nt, synthetic construct
  source 1..22: mol_type = other RNA
tgtaacagtttaatggaatctc

SEQ ID NO: 25257 - RNA, 22 nt, synthetic construct
  source 1..22: mol_type = other RNA
tgtaagatggatcaaaagataa

SEQ ID NO: 25258 - RNA, 22 nt, synthetic construct
  source 1..22: mol_type = other RNA
tgtaatccacagaacaagtccg

SEQ ID NO: 25259 - RNA, 22 nt, synthetic construct
  source 1..22: mol_type = other RNA
tgtaatgggccagagagcttca

SEQ ID NO: 25260 - RNA, 22 nt, synthetic construct
  source 1..22: mol_type = other RNA
tgtactcctgagctcctagtat

SEQ ID NO: 25261 - RNA, 22 nt, synthetic construct
  source 1..22: mol_type = other RNA
tgtactgcgtgggtcatagtaa

SEQ ID NO: 25262 - RNA, 22 nt, synthetic construct
  source 1..22: mol_type = other RNA
tgtactgtttacagcaagttgt

SEQ ID NO: 25263 - RNA, 22 nt, synthetic construct
  source 1..22: mol_type = other RNA
tgtacttgctcctctagtattc

SEQ ID NO: 25264 - RNA, 22 nt, synthetic construct
  source 1..22: mol_type = other RNA
tgtagcatcaggttaaatctta

SEQ ID NO: 25265 - RNA, 22 nt, synthetic construct
  source 1..22: mol_type = other RNA
tgtagccccggacttgttctgt

SEQ ID NO: 25266 - RNA, 22 nt, synthetic construct
  source 1..22: mol_type = other RNA
tgtagctcctgtaacagtttaa

SEQ ID NO: 25267 - RNA, 22 nt, synthetic construct
  source 1..22: mol_type = other RNA
tgtaggacagaaatttaggctg

SEQ ID NO: 25268 - RNA, 22 nt, synthetic construct
  source 1..22: mol_type = other RNA
tgtagtatgtggaaaatagtga

SEQ ID NO: 25269 - RNA, 22 nt, synthetic construct
  source 1..22: mol_type = other RNA
tgtatcacacagacctattctt

SEQ ID NO: 25270 - RNA, 22 nt, synthetic construct
  source 1..22: mol_type = other RNA
tgtattagcaatataaaaagca

SEQ ID NO: 25271 - RNA, 22 nt, synthetic construct
  source 1..22: mol_type = other RNA
tgtcaaaccataaagacattta

SEQ ID NO: 25272 - RNA, 22 nt, synthetic construct
  source 1..22: mol_type = other RNA
tgtcatctcccctttggtcatg

SEQ ID NO: 25273 - RNA, 22 nt, synthetic construct
  source 1..22: mol_type = other RNA
tgtcattgctgatttaaattac

SEQ ID NO: 25274 - RNA, 22 nt, synthetic construct
  source 1..22: mol_type = other RNA
tgtcattttcatgctctatctt

SEQ ID NO: 25275 - RNA, 22 nt, synthetic construct
  source 1..22: mol_type = other RNA
tgtccaaggcaggcacatcttt

SEQ ID NO: 25276 - RNA, 22 nt, synthetic construct
  source 1..22: mol_type = other RNA
tgtccacagttgcaattcaaat

SEQ ID NO: 25277 - RNA, 22 nt, synthetic construct
  source 1..22: mol_type = other RNA
tgtccacgtattctgtaatcca

SEQ ID NO: 25278 - RNA, 22 nt, synthetic construct
  source 1..22: mol_type = other RNA
tgtccctgaccgtcttcacagt

SEQ ID NO: 25279 - RNA, 22 nt, synthetic construct
  source 1..22: mol_type = other RNA
tgtcctaaaggaagatagagca

SEQ ID NO: 25280 - RNA, 22 nt, synthetic construct
  source 1..22: mol_type = other RNA
tgtcctacaagttttcacttcc

SEQ ID NO: 25281 - RNA, 22 nt, synthetic construct
  source 1..22: mol_type = other RNA
tgtcctgggtcccatgcggccc

SEQ ID NO: 25282 - RNA, 22 nt, synthetic construct
  source 1..22: mol_type = other RNA
tgtcctttatatgtggcccaag

SEQ ID NO: 25283 - RNA, 22 nt, synthetic construct
  source 1..22: mol_type = other RNA
tgtcgctcactccatttactta

SEQ ID NO: 25284 - RNA, 22 nt, synthetic construct
  source 1..22: mol_type = other RNA
tgtctaacccgcgggccgcatg

SEQ ID NO: 25285 - RNA, 22 nt, synthetic construct
  source 1..22: mol_type = other RNA
tgtctagccaactttaagtaaa

SEQ ID NO: 25286 - RNA, 22 nt, synthetic construct
  source 1..22: mol_type = other RNA
tgtctcgcgaaaccagacagat

SEQ ID NO: 25287 - RNA, 22 nt, synthetic construct
  source 1..22: mol_type = other RNA
tgtctctagaaaaatgctccaa

SEQ ID NO: 25288 - RNA, 22 nt, synthetic construct
  source 1..22: mol_type = other RNA
tgtctctgtctttagtgttatc

SEQ ID NO: 25289 - RNA, 22 nt, synthetic construct
  source 1..22: mol_type = other RNA
tgtctgaatactagaggagcaa

SEQ ID NO: 25290 - RNA, 22 nt, synthetic construct
  source 1..22: mol_type = other RNA
tgtctggtttcgcgagacacca

SEQ ID NO: 25291 - RNA, 22 nt, synthetic construct
  source 1..22: mol_type = other RNA
tgtctgtctctagaaaaatgct

SEQ ID NO: 25292 - RNA, 22 nt, synthetic construct
  source 1..22: mol_type = other RNA
tgtcttgggccacatataaagg

SEQ ID NO: 25293 - RNA, 22 nt, synthetic construct
  source 1..22: mol_type = other RNA
tgtcttgtactcctgagctcct

SEQ ID NO: 25294 - RNA, 22 nt, synthetic construct
  source 1..22: mol_type = other RNA
tgtctttagtgttatcttttga

SEQ ID NO: 25295 - RNA, 22 nt, synthetic construct
  source 1..22: mol_type = other RNA
tgtgaagacggtcagggacaga

SEQ ID NO: 25296 - RNA, 22 nt, synthetic construct
  source 1..22: mol_type = other RNA
tgtgacttcaggagagaggtca

SEQ ID NO: 25297 - RNA, 22 nt, synthetic construct
  source 1..22: mol_type = other RNA
tgtgatacaaatgaacccagcc

SEQ ID NO: 25298 - RNA, 22 nt, synthetic construct
  source 1..22: mol_type = other RNA
tgtgatagcttccaaattgctg

SEQ ID NO: 25299 - RNA, 22 nt, synthetic construct
  source 1..22: mol_type = other RNA
tgtgatgcataaggtccctgga

SEQ ID NO: 25300 - RNA, 22 nt, synthetic construct
  source 1..22: mol_type = other RNA
tgtgattgttttctataactca

SEQ ID NO: 25301 - RNA, 22 nt, synthetic construct
  source 1..22: mol_type = other RNA
tgtgcctgccttggacaacagt

SEQ ID NO: 25302 - RNA, 22 nt, synthetic construct
  source 1..22: mol_type = other RNA
tgtggaaaatagtgaaaaatga

SEQ ID NO: 25303 - RNA, 22 nt, synthetic construct
  source 1..22: mol_type = other RNA
tgtggacagtatagctgtagcc

SEQ ID NO: 25304 - RNA, 22 nt, synthetic construct
  source 1..22: mol_type = other RNA
tgtggattacagaatacgtgga

SEQ ID NO: 25305 - RNA, 22 nt, synthetic construct
  source 1..22: mol_type = other RNA
tgtggcccaagacagttcttgc

SEQ ID NO: 25306 - RNA, 22 nt, synthetic construct
  source 1..22: mol_type = other RNA
tgtggggtggttctttttggaa

SEQ ID NO: 25307 - RNA, 22 nt, synthetic construct
  source 1..22: mol_type = other RNA
tgtggtggaaccaatctgtctg

SEQ ID NO: 25308 - RNA, 22 nt, synthetic construct
  source 1..22: mol_type = other RNA
tgtgtagtatgtggaaaatagt

SEQ ID NO: 25309 - RNA, 22 nt, synthetic construct
  source 1..22: mol_type = other RNA
tgtgtgatacaaatgaacccag

SEQ ID NO: 25310 - RNA, 22 nt, synthetic construct
  source 1..22: mol_type = other RNA
tgtgtgatagcttccaaattgc

SEQ ID NO: 25311 - RNA, 22 nt, synthetic construct
  source 1..22: mol_type = other RNA
tgtgtgtagtatgtggaaaata

SEQ ID NO: 25312 - RNA, 22 nt, synthetic construct
  source 1..22: mol_type = other RNA
tgtgtgtgtagtatgtggaaaa

SEQ ID NO: 25313 - RNA, 22 nt, synthetic construct
  source 1..22: mol_type = other RNA
tgttaaaatgttggtattataa

SEQ ID NO: 25314 - RNA, 22 nt, synthetic construct
  source 1..22: mol_type = other RNA
tgttaaattgaggaaagtctat

SEQ ID NO: 25315 - RNA, 22 nt, synthetic construct
  source 1..22: mol_type = other RNA
tgttacaggagctacatagtta

SEQ ID NO: 25316 - RNA, 22 nt, synthetic construct
  source 1..22: mol_type = other RNA
tgttaggatgattgtcctaaag

SEQ ID NO: 25317 - RNA, 22 nt, synthetic construct
  source 1..22: mol_type = other RNA
tgttatcttttgatccatctta

SEQ ID NO: 25318 - RNA, 22 nt, synthetic construct
  source 1..22: mol_type = other RNA
tgttctatgacccaaactgccc

SEQ ID NO: 25319 - RNA, 22 nt, synthetic construct
  source 1..22: mol_type = other RNA
tgttctcgtgaatgtgatgcat

SEQ ID NO: 25320 - RNA, 22 nt, synthetic construct
  source 1..22: mol_type = other RNA
tgttctgtggattacagaatac

SEQ ID NO: 25321 - RNA, 22 nt, synthetic construct
  source 1..22: mol_type = other RNA
tgttcttaccagttagtaactg

SEQ ID NO: 25322 - RNA, 22 nt, synthetic construct
  source 1..22: mol_type = other RNA
tgttgcctaacctcagatccaa

SEQ ID NO: 25323 - RNA, 22 nt, synthetic construct
  source 1..22: mol_type = other RNA
tgttggacttagctttcagcta

SEQ ID NO: 25324 - RNA, 22 nt, synthetic construct
  source 1..22: mol_type = other RNA
tgttgggtcgcattcaaagctg

SEQ ID NO: 25325 - RNA, 22 nt, synthetic construct
  source 1..22: mol_type = other RNA
tgttggtattataattcctcag

SEQ ID NO: 25326 - RNA, 22 nt, synthetic construct
  source 1..22: mol_type = other RNA
tgttgtacttgctcctctagta

SEQ ID NO: 25327 - RNA, 22 nt, synthetic construct
  source 1..22: mol_type = other RNA
tgttgtcattgctgatttaaat

SEQ ID NO: 25328 - RNA, 22 nt, synthetic construct
  source 1..22: mol_type = other RNA
tgttgtccaaggcaggcacatc

SEQ ID NO: 25329 - RNA, 22 nt, synthetic construct
  source 1..22: mol_type = other RNA
tgttgttctatgacccaaactg

SEQ ID NO: 25330 - RNA, 22 nt, synthetic construct
  source 1..22: mol_type = other RNA
tgtttacagcaagttgtctaac

SEQ ID NO: 25331 - RNA, 22 nt, synthetic construct
  source 1..22: mol_type = other RNA
tgtttccaggaagtgaaaactt

SEQ ID NO: 25332 - RNA, 22 nt, synthetic construct
  source 1..22: mol_type = other RNA
tgttttctataactcaagatat

SEQ ID NO: 25333 - RNA, 22 nt, synthetic construct
  source 1..22: mol_type = other RNA
ttaaaaaagcagttttcttctg

SEQ ID NO: 25334 - RNA, 22 nt, synthetic construct
  source 1..22: mol_type = other RNA
ttaaaaatggtttgttggactt

SEQ ID NO: 25335 - RNA, 22 nt, synthetic construct
  source 1..22: mol_type = other RNA
ttaaaagcagcaagggtagcat

SEQ ID NO: 25336 - RNA, 22 nt, synthetic construct
  source 1..22: mol_type = other RNA
ttaaaagggcagtttgggtcat

SEQ ID NO: 25337 - RNA, 22 nt, synthetic construct
  source 1..22: mol_type = other RNA
ttaaaatgttggtattataatt

SEQ ID NO: 25338 - RNA, 22 nt, synthetic construct
  source 1..22: mol_type = other RNA
ttaaactgttacaggagctaca

SEQ ID NO: 25339 - RNA, 22 nt, synthetic construct
  source 1..22: mol_type = other RNA
ttaaagatgtgcctgccttgga

SEQ ID NO: 25340 - RNA, 22 nt, synthetic construct
  source 1..22: mol_type = other RNA
ttaaagttggctagacatcaga

SEQ ID NO: 25341 - RNA, 22 nt, synthetic construct
  source 1..22: mol_type = other RNA
ttaaatcagcaatgacaacaac

SEQ ID NO: 25342 - RNA, 22 nt, synthetic construct
  source 1..22: mol_type = other RNA
ttaaatgaaatgtaatgggcca

SEQ ID NO: 25343 - RNA, 22 nt, synthetic construct
  source 1..22: mol_type = other RNA
ttaaattgaggaaagtctatcc

SEQ ID NO: 25344 - RNA, 22 nt, synthetic construct
  source 1..22: mol_type = other RNA
ttaacctgatgctacactttgg

SEQ ID NO: 25345 - RNA, 22 nt, synthetic construct
  source 1..22: mol_type = other RNA
ttaacgcttgctttcactgttg

SEQ ID NO: 25346 - RNA, 22 nt, synthetic construct
  source 1..22: mol_type = other RNA
ttaactatgtagctcctgtaac

SEQ ID NO: 25347 - RNA, 22 nt, synthetic construct
  source 1..22: mol_type = other RNA
ttaactattctgagctttttga

SEQ ID NO: 25348 - RNA, 22 nt, synthetic construct
  source 1..22: mol_type = other RNA
ttaagaacgtgaactagggagg

SEQ ID NO: 25349 - RNA, 22 nt, synthetic construct
  source 1..22: mol_type = other RNA
ttaagatttaacctgatgctac

SEQ ID NO: 25350 - RNA, 22 nt, synthetic construct
  source 1..22: mol_type = other RNA
ttaaggcttgagctggggcttg

SEQ ID NO: 25351 - RNA, 22 nt, synthetic construct
  source 1..22: mol_type = other RNA
ttaaggtaatttaaatcagcaa

SEQ ID NO: 25352 - RNA, 22 nt, synthetic construct
  source 1..22: mol_type = other RNA
ttaagtaaatggagtgagcgac

SEQ ID NO: 25353 - RNA, 22 nt, synthetic construct
  source 1..22: mol_type = other RNA
ttaatcctgcagattcaaatgt

SEQ ID NO: 25354 - RNA, 22 nt, synthetic construct
  source 1..22: mol_type = other RNA
ttaatcttgagcattggaaaag

SEQ ID NO: 25355 - RNA, 22 nt, synthetic construct
  source 1..22: mol_type = other RNA
ttaatggaatctcacctcccta

SEQ ID NO: 25356 - RNA, 22 nt, synthetic construct
  source 1..22: mol_type = other RNA
ttaatttgtggtggaaccaatc

SEQ ID NO: 25357 - RNA, 22 nt, synthetic construct
  source 1..22: mol_type = other RNA
ttacagaatacgtggacattga

SEQ ID NO: 25358 - RNA, 22 nt, synthetic construct
  source 1..22: mol_type = other RNA
ttacagagaattggatctgagg

SEQ ID NO: 25359 - RNA, 22 nt, synthetic construct
  source 1..22: mol_type = other RNA
ttacagcaagttgtctaacccg

SEQ ID NO: 25360 - RNA, 22 nt, synthetic construct
  source 1..22: mol_type = other RNA
ttacaggagctacatagttaaa

SEQ ID NO: 25361 - RNA, 22 nt, synthetic construct
  source 1..22: mol_type = other RNA
ttacaggatgaattctgttctc

SEQ ID NO: 25362 - RNA, 22 nt, synthetic construct
  source 1..22: mol_type = other RNA
ttacatcttgttaggatgattg

SEQ ID NO: 25363 - RNA, 22 nt, synthetic construct
  source 1..22: mol_type = other RNA
ttacatgtcgctcactccattt

SEQ ID NO: 25364 - RNA, 22 nt, synthetic construct
  source 1..22: mol_type = other RNA
ttaccagttagtaactgatctc

SEQ ID NO: 25365 - RNA, 22 nt, synthetic construct
  source 1..22: mol_type = other RNA
ttacccaaatcatagagacgtc

SEQ ID NO: 25366 - RNA, 22 nt, synthetic construct
  source 1..22: mol_type = other RNA
ttacccagcagtgcttttattc

SEQ ID NO: 25367 - RNA, 22 nt, synthetic construct
  source 1..22: mol_type = other RNA
ttaccttaactattctgagctt

SEQ ID NO: 25368 - RNA, 22 nt, synthetic construct
  source 1..22: mol_type = other RNA
ttactaactggtaagaacagaa

SEQ ID NO: 25369 - RNA, 22 nt, synthetic construct
  source 1..22: mol_type = other RNA
ttactatgacccacgcagtaca

SEQ ID NO: 25370 - RNA, 22 nt, synthetic construct
  source 1..22: mol_type = other RNA
ttactgagcagtaaggaaataa

SEQ ID NO: 25371 - RNA, 22 nt, synthetic construct
  source 1..22: mol_type = other RNA
ttactgctcagtaaaaagagaa

SEQ ID NO: 25372 - RNA, 22 nt, synthetic construct
  source 1..22: mol_type = other RNA
ttactggcttgtactgtttaca

SEQ ID NO: 25373 - RNA, 22 nt, synthetic construct
  source 1..22: mol_type = other RNA
ttacttaaagttggctagacat

SEQ ID NO: 25374 - RNA, 22 nt, synthetic construct
  source 1..22: mol_type = other RNA
ttactttgtgattgttttctat

SEQ ID NO: 25375 - RNA, 22 nt, synthetic construct
  source 1..22: mol_type = other RNA
ttagacaacttgctgtaaacag

SEQ ID NO: 25376 - RNA, 22 nt, synthetic construct
  source 1..22: mol_type = other RNA
ttagagctcctccaatcaagtg

SEQ ID NO: 25377 - RNA, 22 nt, synthetic construct
  source 1..22: mol_type = other RNA
ttagaggaagaaaaagggagat

SEQ ID NO: 25378 - RNA, 22 nt, synthetic construct
  source 1..22: mol_type = other RNA
ttagcaactctcactcatactt

SEQ ID NO: 25379 - RNA, 22 nt, synthetic construct
  source 1..22: mol_type = other RNA
ttagctgaaagctaagtccaac

SEQ ID NO: 25380 - RNA, 22 nt, synthetic construct
  source 1..22: mol_type = other RNA
ttagctgggattctgtccctga

SEQ ID NO: 25381 - RNA, 22 nt, synthetic construct
  source 1..22: mol_type = other RNA
ttagcttttgcttgagaaacca

SEQ ID NO: 25382 - RNA, 22 nt, synthetic construct
  source 1..22: mol_type = other RNA
ttaggacaatcatcctaacaag

SEQ ID NO: 25383 - RNA, 22 nt, synthetic construct
  source 1..22: mol_type = other RNA
ttaggatgattgtcctaaagga

SEQ ID NO: 25384 - RNA, 22 nt, synthetic construct
  source 1..22: mol_type = other RNA
ttaggcaacatctccctttttc

SEQ ID NO: 25385 - RNA, 22 nt, synthetic construct
  source 1..22: mol_type = other RNA
ttaggctgggttcatttgtatc

SEQ ID NO: 25386 - RNA, 22 nt, synthetic construct
  source 1..22: mol_type = other RNA
ttagggaggtgagattccatta

SEQ ID NO: 25387 - RNA, 22 nt, synthetic construct
  source 1..22: mol_type = other RNA
ttagtaactgatctcagatgcc

SEQ ID NO: 25388 - RNA, 22 nt, synthetic construct
  source 1..22: mol_type = other RNA
ttagtcataccagccacttttc

SEQ ID NO: 25389 - RNA, 22 nt, synthetic construct
  source 1..22: mol_type = other RNA
ttagtgttatcttttgatccat

SEQ ID NO: 25390 - RNA, 22 nt, synthetic construct
  source 1..22: mol_type = other RNA
ttataataccaacattttaaca

SEQ ID NO: 25391 - RNA, 22 nt, synthetic construct
  source 1..22: mol_type = other RNA
ttataattcctcaggataaaac

SEQ ID NO: 25392 - RNA, 22 nt, synthetic construct
  source 1..22: mol_type = other RNA
ttataccatttgagacccttgc

SEQ ID NO: 25393 - RNA, 22 nt, synthetic construct
  source 1..22: mol_type = other RNA
ttatatatttagctgaaagcta

SEQ ID NO: 25394 - RNA, 22 nt, synthetic construct
  source 1..22: mol_type = other RNA
ttatatgtggcccaagacagtt

SEQ ID NO: 25395 - RNA, 22 nt, synthetic construct
  source 1..22: mol_type = other RNA
ttatcactacttatcatttttg

SEQ ID NO: 25396 - RNA, 22 nt, synthetic construct
  source 1..22: mol_type = other RNA
ttatcatttttggagcattttt

SEQ ID NO: 25397 - RNA, 22 nt, synthetic construct
  source 1..22: mol_type = other RNA
ttatcctgaggaattataatac

SEQ ID NO: 25398 - RNA, 22 nt, synthetic construct
  source 1..22: mol_type = other RNA
ttatcctttttccttagctggg

SEQ ID NO: 25399 - RNA, 22 nt, synthetic construct
  source 1..22: mol_type = other RNA
ttatctaatttgaattgcaact

SEQ ID NO: 25400 - RNA, 22 nt, synthetic construct
  source 1..22: mol_type = other RNA
ttatcttttgatccatcttaca

SEQ ID NO: 25401 - RNA, 22 nt, synthetic construct
  source 1..22: mol_type = other RNA
ttatgcatcacattcacgagaa

SEQ ID NO: 25402 - RNA, 22 nt, synthetic construct
  source 1..22: mol_type = other RNA
ttatggtttgacattttattaa

SEQ ID NO: 25403 - RNA, 22 nt, synthetic construct
  source 1..22: mol_type = other RNA
ttatgtctgtctctagaaaaat

SEQ ID NO: 25404 - RNA, 22 nt, synthetic construct
  source 1..22: mol_type = other RNA
ttattaatcttgagcattggaa

SEQ ID NO: 25405 - RNA, 22 nt, synthetic construct
  source 1..22: mol_type = other RNA
ttattatatatttagctgaaag

SEQ ID NO: 25406 - RNA, 22 nt, synthetic construct
  source 1..22: mol_type = other RNA
ttattcctccctagttcacgtt

SEQ ID NO: 25407 - RNA, 22 nt, synthetic construct
  source 1..22: mol_type = other RNA
ttatttccttactgctcagtaa

SEQ ID NO: 25408 - RNA, 22 nt, synthetic construct
  source 1..22: mol_type = other RNA
ttcaaaaagctcagaatagtta

SEQ ID NO: 25409 - RNA, 22 nt, synthetic construct
  source 1..22: mol_type = other RNA
ttcaaagctgtcctgggtccca

SEQ ID NO: 25410 - RNA, 22 nt, synthetic construct
  source 1..22: mol_type = other RNA
ttcaaatgtcatctcccctttg

SEQ ID NO: 25411 - RNA, 22 nt, synthetic construct
  source 1..22: mol_type = other RNA
ttcaagttctgatatatttaac

SEQ ID NO: 25412 - RNA, 22 nt, synthetic construct
  source 1..22: mol_type = other RNA
ttcacagtccaggtgatcttga

SEQ ID NO: 25413 - RNA, 22 nt, synthetic construct
  source 1..22: mol_type = other RNA
ttcacctgtcattttcatgctc

SEQ ID NO: 25414 - RNA, 22 nt, synthetic construct
  source 1..22: mol_type = other RNA
ttcacgagaacagaattcatcc

SEQ ID NO: 25415 - RNA, 22 nt, synthetic construct
  source 1..22: mol_type = other RNA
ttcactattttccacatactac

SEQ ID NO: 25416 - RNA, 22 nt, synthetic construct
  source 1..22: mol_type = other RNA
ttcactgttgtccaaggcaggc

SEQ ID NO: 25417 - RNA, 22 nt, synthetic construct
  source 1..22: mol_type = other RNA
ttcacttcctggaaacacttga

SEQ ID NO: 25418 - RNA, 22 nt, synthetic construct
  source 1..22: mol_type = other RNA
ttcagacatagcactagctttc

SEQ ID NO: 25419 - RNA, 22 nt, synthetic construct
  source 1..22: mol_type = other RNA
ttcagcttttatttccttactg

SEQ ID NO: 25420 - RNA, 22 nt, synthetic construct
  source 1..22: mol_type = other RNA
ttcaggagagaggtcatatttg

SEQ ID NO: 25421 - RNA, 22 nt, synthetic construct
  source 1..22: mol_type = other RNA
ttcagttctttagtcataccag

SEQ ID NO: 25422 - RNA, 22 nt, synthetic construct
  source 1..22: mol_type = other RNA
ttcatcctgtaaaccaggggtg

SEQ ID NO: 25423 - RNA, 22 nt, synthetic construct
  source 1..22: mol_type = other RNA
ttcatgctctatcttcctttag

SEQ ID NO: 25424 - RNA, 22 nt, synthetic construct
  source 1..22: mol_type = other RNA
ttcattccatgtgacttcagga

SEQ ID NO: 25425 - RNA, 22 nt, synthetic construct
  source 1..22: mol_type = other RNA
ttcatttgtatcacacagacct

SEQ ID NO: 25426 - RNA, 22 nt, synthetic construct
  source 1..22: mol_type = other RNA
ttcattttatcctttttcctta

SEQ ID NO: 25427 - RNA, 22 nt, synthetic construct
  source 1..22: mol_type = other RNA
ttcatttttcactattttccac

SEQ ID NO: 25428 - RNA, 22 nt, synthetic construct
  source 1..22: mol_type = other RNA
ttccaaaaagaaccaccccaca

SEQ ID NO: 25429 - RNA, 22 nt, synthetic construct
  source 1..22: mol_type = other RNA
ttccaaattgctgtctctgtct

SEQ ID NO: 25430 - RNA, 22 nt, synthetic construct
  source 1..22: mol_type = other RNA
ttccaatgctcaagattaataa

SEQ ID NO: 25431 - RNA, 22 nt, synthetic construct
  source 1..22: mol_type = other RNA
ttccacatactacacacacaaa

SEQ ID NO: 25432 - RNA, 22 nt, synthetic construct
  source 1..22: mol_type = other RNA
ttccaccacaaattaaggcttg

SEQ ID NO: 25433 - RNA, 22 nt, synthetic construct
  source 1..22: mol_type = other RNA
ttccaggaagtgaaaacttgta

SEQ ID NO: 25434 - RNA, 22 nt, synthetic construct
  source 1..22: mol_type = other RNA
ttccatggtctgttgttctatg

SEQ ID NO: 25435 - RNA, 22 nt, synthetic construct
  source 1..22: mol_type = other RNA
ttccatgtgacttcaggagaga

SEQ ID NO: 25436 - RNA, 22 nt, synthetic construct
  source 1..22: mol_type = other RNA
ttccattaaactgttacaggag

SEQ ID NO: 25437 - RNA, 22 nt, synthetic construct
  source 1..22: mol_type = other RNA
ttccatttgttgtacttgctcc

SEQ ID NO: 25438 - RNA, 22 nt, synthetic construct
  source 1..22: mol_type = other RNA
ttccctccctcaccctctctcc

SEQ ID NO: 25439 - RNA, 22 nt, synthetic construct
  source 1..22: mol_type = other RNA
ttccctgggccacactgcaaga

SEQ ID NO: 25440 - RNA, 22 nt, synthetic construct
  source 1..22: mol_type = other RNA
ttcctcaatttaacagcttttt

SEQ ID NO: 25441 - RNA, 22 nt, synthetic construct
  source 1..22: mol_type = other RNA
ttcctcaggataaaacttactt

SEQ ID NO: 25442 - RNA, 22 nt, synthetic construct
  source 1..22: mol_type = other RNA
ttcctccctagttcacgttctt

SEQ ID NO: 25443 - RNA, 22 nt, synthetic construct
  source 1..22: mol_type = other RNA
ttcctctaaatacctctcattt

SEQ ID NO: 25444 - RNA, 22 nt, synthetic construct
  source 1..22: mol_type = other RNA
ttcctggaaacacttgattgga

SEQ ID NO: 25445 - RNA, 22 nt, synthetic construct
  source 1..22: mol_type = other RNA
ttccttactgctcagtaaaaag

SEQ ID NO: 25446 - RNA, 22 nt, synthetic construct
  source 1..22: mol_type = other RNA
ttccttagctgggattctgtcc

SEQ ID NO: 25447 - RNA, 22 nt, synthetic construct
  source 1..22: mol_type = other RNA
ttccttcaaaaagctcagaata

SEQ ID NO: 25448 - RNA, 22 nt, synthetic construct
  source 1..22: mol_type = other RNA
ttcctttaggacaatcatccta

SEQ ID NO: 25449 - RNA, 22 nt, synthetic construct
  source 1..22: mol_type = other RNA
ttcgcgagacaccaggctaccc

SEQ ID NO: 25450 - RNA, 22 nt, synthetic construct
  source 1..22: mol_type = other RNA
ttcggcttccctgggccacact

SEQ ID NO: 25451 - RNA, 22 nt, synthetic construct
  source 1..22: mol_type = other RNA
ttcgtaaactttcttaaagttt

SEQ ID NO: 25452 - RNA, 22 nt, synthetic construct
  source 1..22: mol_type = other RNA
ttctagagacagacataaagca

SEQ ID NO: 25453 - RNA, 22 nt, synthetic construct
  source 1..22: mol_type = other RNA
ttctataactcaagatatgatg

SEQ ID NO: 25454 - RNA, 22 nt, synthetic construct
  source 1..22: mol_type = other RNA
ttctatgacccaaactgccctt

SEQ ID NO: 25455 - RNA, 22 nt, synthetic construct
  source 1..22: mol_type = other RNA
ttctattaagatttaacctgat

SEQ ID NO: 25456 - RNA, 22 nt, synthetic construct
  source 1..22: mol_type = other RNA
ttctccctctcttgatcttggg

SEQ ID NO: 25457 - RNA, 22 nt, synthetic construct
  source 1..22: mol_type = other RNA
ttctcgtgaatgtgatgcataa

SEQ ID NO: 25458 - RNA, 22 nt, synthetic construct
  source 1..22: mol_type = other RNA
ttctctgtaaagcagtagtcaa

SEQ ID NO: 25459 - RNA, 22 nt, synthetic construct
  source 1..22: mol_type = other RNA
ttctctttttactgagcagtaa

SEQ ID NO: 25460 - RNA, 22 nt, synthetic construct
  source 1..22: mol_type = other RNA
ttctgactcctgagcagtttgt

SEQ ID NO: 25461 - RNA, 22 nt, synthetic construct
  source 1..22: mol_type = other RNA
ttctgagctttttgaaggaata

SEQ ID NO: 25462 - RNA, 22 nt, synthetic construct
  source 1..22: mol_type = other RNA
ttctgatatatttaactatgta

SEQ ID NO: 25463 - RNA, 22 nt, synthetic construct
  source 1..22: mol_type = other RNA
ttctggggttgttgtcattgct

SEQ ID NO: 25464 - RNA, 22 nt, synthetic construct
  source 1..22: mol_type = other RNA
ttctgtaatccacagaacaagt

SEQ ID NO: 25465 - RNA, 22 nt, synthetic construct
  source 1..22: mol_type = other RNA
ttctgtccctgaccgtcttcac

SEQ ID NO: 25466 - RNA, 22 nt, synthetic construct
  source 1..22: mol_type = other RNA
ttctgtcctacaagttttcact

SEQ ID NO: 25467 - RNA, 22 nt, synthetic construct
  source 1..22: mol_type = other RNA
ttctgtggattacagaatacgt

SEQ ID NO: 25468 - RNA, 22 nt, synthetic construct
  source 1..22: mol_type = other RNA
ttctgttctcgtgaatgtgatg

SEQ ID NO: 25469 - RNA, 22 nt, synthetic construct
  source 1..22: mol_type = other RNA
ttctgttcttaccagttagtaa

SEQ ID NO: 25470 - RNA, 22 nt, synthetic construct
  source 1..22: mol_type = other RNA
ttcttaccagttagtaactgat

SEQ ID NO: 25471 - RNA, 22 nt, synthetic construct
  source 1..22: mol_type = other RNA
ttcttcctctaaatacctctca

SEQ ID NO: 25472 - RNA, 22 nt, synthetic construct
  source 1..22: mol_type = other RNA
ttcttctgactcctgagcagtt

SEQ ID NO: 25473 - RNA, 22 nt, synthetic construct
  source 1..22: mol_type = other RNA
ttcttgcagtgtggcccaggga

SEQ ID NO: 25474 - RNA, 22 nt, synthetic construct
  source 1..22: mol_type = other RNA
ttctttagtcataccagccact

SEQ ID NO: 25475 - RNA, 22 nt, synthetic construct
  source 1..22: mol_type = other RNA
ttctttttggaatgctaccctt

SEQ ID NO: 25476 - RNA, 22 nt, synthetic construct
  source 1..22: mol_type = other RNA
ttgaaatccaaactcattaacg

SEQ ID NO: 25477 - RNA, 22 nt, synthetic construct
  source 1..22: mol_type = other RNA
ttgaaggaatagtgtcttgtac

SEQ ID NO: 25478 - RNA, 22 nt, synthetic construct
  source 1..22: mol_type = other RNA
ttgaatctgcaggattaaaagc

SEQ ID NO: 25479 - RNA, 22 nt, synthetic construct
  source 1..22: mol_type = other RNA
ttgaatgaagaataggtctgtg

SEQ ID NO: 25480 - RNA, 22 nt, synthetic construct
  source 1..22: mol_type = other RNA
ttgaattgcaactgtggacagt

SEQ ID NO: 25481 - RNA, 22 nt, synthetic construct
  source 1..22: mol_type = other RNA
ttgacattttattaatcttgag

SEQ ID NO: 25482 - RNA, 22 nt, synthetic construct
  source 1..22: mol_type = other RNA
ttgactactgctttacagagaa

SEQ ID NO: 25483 - RNA, 22 nt, synthetic construct
  source 1..22: mol_type = other RNA
ttgactcttacccagcagtgct

SEQ ID NO: 25484 - RNA, 22 nt, synthetic construct
  source 1..22: mol_type = other RNA
ttgagaaaccagtgcttccctc

SEQ ID NO: 25485 - RNA, 22 nt, synthetic construct
  source 1..22: mol_type = other RNA
ttgagacccttgctgcaccacc

SEQ ID NO: 25486 - RNA, 22 nt, synthetic construct
  source 1..22: mol_type = other RNA
ttgagcattggaaaagtggctg

SEQ ID NO: 25487 - RNA, 22 nt, synthetic construct
  source 1..22: mol_type = other RNA
ttgagctggggcttgactctta

SEQ ID NO: 25488 - RNA, 22 nt, synthetic construct
  source 1..22: mol_type = other RNA
ttgaggaaagtctatccaggga

SEQ ID NO: 25489 - RNA, 22 nt, synthetic construct
  source 1..22: mol_type = other RNA
ttgagttatagaaaacaatcac

SEQ ID NO: 25490 - RNA, 22 nt, synthetic construct
  source 1..22: mol_type = other RNA
ttgatccatcttacatcttgtt

SEQ ID NO: 25491 - RNA, 22 nt, synthetic construct
  source 1..22: mol_type = other RNA
ttgatcccattttccatttgtt

SEQ ID NO: 25492 - RNA, 22 nt, synthetic construct
  source 1..22: mol_type = other RNA
ttgatcttgggtagcctggtgt

SEQ ID NO: 25493 - RNA, 22 nt, synthetic construct
  source 1..22: mol_type = other RNA
ttgatggttttctctttttact

SEQ ID NO: 25494 - RNA, 22 nt, synthetic construct
  source 1..22: mol_type = other RNA
ttgattggaggagctctaagca

SEQ ID NO: 25495 - RNA, 22 nt, synthetic construct
  source 1..22: mol_type = other RNA
ttgattttcattttatcctttt

SEQ ID NO: 25496 - RNA, 22 nt, synthetic construct
  source 1..22: mol_type = other RNA
ttgcaactgtggacagtatagc

SEQ ID NO: 25497 - RNA, 22 nt, synthetic construct
  source 1..22: mol_type = other RNA
ttgcagtgtggcccagggaagc

SEQ ID NO: 25498 - RNA, 22 nt, synthetic construct
  source 1..22: mol_type = other RNA
ttgcagttacccaaatcataga

SEQ ID NO: 25499 - RNA, 22 nt, synthetic construct
  source 1..22: mol_type = other RNA
ttgcatccctaccaggcatctt

SEQ ID NO: 25500 - RNA, 22 nt, synthetic construct
  source 1..22: mol_type = other RNA
ttgcctaacctcagatccaatt

SEQ ID NO: 25501 - RNA, 22 nt, synthetic construct
  source 1..22: mol_type = other RNA
ttgctaagatgcctggtaggga

SEQ ID NO: 25502 - RNA, 22 nt, synthetic construct
  source 1..22: mol_type = other RNA
ttgctcatcagctgtcctttat

SEQ ID NO: 25503 - RNA, 22 nt, synthetic construct
  source 1..22: mol_type = other RNA
ttgctcctctagtattcagaca

SEQ ID NO: 25504 - RNA, 22 nt, synthetic construct
  source 1..22: mol_type = other RNA
ttgctgatttaaattaccttaa

SEQ ID NO: 25505 - RNA, 22 nt, synthetic construct
  source 1..22: mol_type = other RNA
ttgctgcaccaccaaagtgtag

SEQ ID NO: 25506 - RNA, 22 nt, synthetic construct
  source 1..22: mol_type = other RNA
ttgctgcttttaatcctgcaga

SEQ ID NO: 25507 - RNA, 22 nt, synthetic construct
  source 1..22: mol_type = other RNA
ttgctgtaaacagtacaagcca

SEQ ID NO: 25508 - RNA, 22 nt, synthetic construct
  source 1..22: mol_type = other RNA
ttgctgtctctgtctttagtgt

SEQ ID NO: 25509 - RNA, 22 nt, synthetic construct
  source 1..22: mol_type = other RNA
ttgcttgagaaaccagtgcttc

SEQ ID NO: 25510 - RNA, 22 nt, synthetic construct
  source 1..22: mol_type = other RNA
ttgctttcactgttgtccaagg

SEQ ID NO: 25511 - RNA, 22 nt, synthetic construct
  source 1..22: mol_type = other RNA
ttggaaaagtggctggtatgac

SEQ ID NO: 25512 - RNA, 22 nt, synthetic construct
  source 1..22: mol_type = other RNA
ttggaagctatcacacaggcat

SEQ ID NO: 25513 - RNA, 22 nt, synthetic construct
  source 1..22: mol_type = other RNA
ttggaatgctacccttgctgct

SEQ ID NO: 25514 - RNA, 22 nt, synthetic construct
  source 1..22: mol_type = other RNA
ttggacaacagtgaaagcaagc

SEQ ID NO: 25515 - RNA, 22 nt, synthetic construct
  source 1..22: mol_type = other RNA
ttggacacccctggtttacagg

SEQ ID NO: 25516 - RNA, 22 nt, synthetic construct
  source 1..22: mol_type = other RNA
ttggacttagctttcagctaaa

SEQ ID NO: 25517 - RNA, 22 nt, synthetic construct
  source 1..22: mol_type = other RNA
ttggagcatttttctagagaca

SEQ ID NO: 25518 - RNA, 22 nt, synthetic construct
  source 1..22: mol_type = other RNA
ttggaggagctctaagcatcat

SEQ ID NO: 25519 - RNA, 22 nt, synthetic construct
  source 1..22: mol_type = other RNA
ttggatctgaggttaggcaaca

SEQ ID NO: 25520 - RNA, 22 nt, synthetic construct
  source 1..22: mol_type = other RNA
ttggctagacatcagagtatac

SEQ ID NO: 25521 - RNA, 22 nt, synthetic construct
  source 1..22: mol_type = other RNA
ttgggccacatataaaggacag

SEQ ID NO: 25522 - RNA, 22 nt, synthetic construct
  source 1..22: mol_type = other RNA
ttgggtaactgcaattcattcc

SEQ ID NO: 25523 - RNA, 22 nt, synthetic construct
  source 1..22: mol_type = other RNA
ttgggtagcctggtgtctcgcg

SEQ ID NO: 25524 - RNA, 22 nt, synthetic construct
  source 1..22: mol_type = other RNA
ttgggtcatagaacaacagacc

SEQ ID NO: 25525 - RNA, 22 nt, synthetic construct
  source 1..22: mol_type = other RNA
ttgggtcgcattcaaagctgtc

SEQ ID NO: 25526 - RNA, 22 nt, synthetic construct
  source 1..22: mol_type = other RNA
ttggtattataattcctcagga

SEQ ID NO: 25527 - RNA, 22 nt, synthetic construct
  source 1..22: mol_type = other RNA
ttggtcatgccttccatggtct

SEQ ID NO: 25528 - RNA, 22 nt, synthetic construct
  source 1..22: mol_type = other RNA
ttggtggtgcagcaagggtctc

SEQ ID NO: 25529 - RNA, 22 nt, synthetic construct
  source 1..22: mol_type = other RNA
ttggtgttaaaatgttggtatt

SEQ ID NO: 25530 - RNA, 22 nt, synthetic construct
  source 1..22: mol_type = other RNA
ttggttccaccacaaattaagg

SEQ ID NO: 25531 - RNA, 22 nt, synthetic construct
  source 1..22: mol_type = other RNA
ttgtactcctgagctcctagta

SEQ ID NO: 25532 - RNA, 22 nt, synthetic construct
  source 1..22: mol_type = other RNA
ttgtactgcgtgggtcatagta

SEQ ID NO: 25533 - RNA, 22 nt, synthetic construct
  source 1..22: mol_type = other RNA
ttgtactgtttacagcaagttg

SEQ ID NO: 25534 - RNA, 22 nt, synthetic construct
  source 1..22: mol_type = other RNA
ttgtacttgctcctctagtatt

SEQ ID NO: 25535 - RNA, 22 nt, synthetic construct
  source 1..22: mol_type = other RNA
ttgtaggacagaaatttaggct

SEQ ID NO: 25536 - RNA, 22 nt, synthetic construct
  source 1..22: mol_type = other RNA
ttgtatcacacagacctattct

SEQ ID NO: 25537 - RNA, 22 nt, synthetic construct
  source 1..22: mol_type = other RNA
ttgtcattgctgatttaaatta

SEQ ID NO: 25538 - RNA, 22 nt, synthetic construct
  source 1..22: mol_type = other RNA
ttgtccaaggcaggcacatctt

SEQ ID NO: 25539 - RNA, 22 nt, synthetic construct
  source 1..22: mol_type = other RNA
ttgtcctaaaggaagatagagc

SEQ ID NO: 25540 - RNA, 22 nt, synthetic construct
  source 1..22: mol_type = other RNA
ttgtctaacccgcgggccgcat

SEQ ID NO: 25541 - RNA, 22 nt, synthetic construct
  source 1..22: mol_type = other RNA
ttgtgattgttttctataactc

SEQ ID NO: 25542 - RNA, 22 nt, synthetic construct
  source 1..22: mol_type = other RNA
ttgtggggtggttctttttgga

SEQ ID NO: 25543 - RNA, 22 nt, synthetic construct
  source 1..22: mol_type = other RNA
ttgtggtggaaccaatctgtct

SEQ ID NO: 25544 - RNA, 22 nt, synthetic construct
  source 1..22: mol_type = other RNA
ttgtgtgtgtagtatgtggaaa

SEQ ID NO: 25545 - RNA, 22 nt, synthetic construct
  source 1..22: mol_type = other RNA
ttgttaggatgattgtcctaaa

SEQ ID NO: 25546 - RNA, 22 nt, synthetic construct
  source 1..22: mol_type = other RNA
ttgttctatgacccaaactgcc

SEQ ID NO: 25547 - RNA, 22 nt, synthetic construct
  source 1..22: mol_type = other RNA
ttgttctgtggattacagaata

SEQ ID NO: 25548 - RNA, 22 nt, synthetic construct
  source 1..22: mol_type = other RNA
ttgttggacttagctttcagct

SEQ ID NO: 25549 - RNA, 22 nt, synthetic construct
  source 1..22: mol_type = other RNA
ttgttgtacttgctcctctagt

SEQ ID NO: 25550 - RNA, 22 nt, synthetic construct
  source 1..22: mol_type = other RNA
ttgttgtcattgctgatttaaa

SEQ ID NO: 25551 - RNA, 22 nt, synthetic construct
  source 1..22: mol_type = other RNA
ttgttttctataactcaagata

SEQ ID NO: 25552 - RNA, 22 nt, synthetic construct
  source 1..22: mol_type = other RNA
tttaaaaaagcagttttcttct

SEQ ID NO: 25553 - RNA, 22 nt, synthetic construct
  source 1..22: mol_type = other RNA
tttaaaaatggtttgttggact

SEQ ID NO: 25554 - RNA, 22 nt, synthetic construct
  source 1..22: mol_type = other RNA
tttaaaagggcagtttgggtca

SEQ ID NO: 25555 - RNA, 22 nt, synthetic construct
  source 1..22: mol_type = other RNA
tttaaagatgtgcctgccttgg

SEQ ID NO: 25556 - RNA, 22 nt, synthetic construct
  source 1..22: mol_type = other RNA
tttaaatcagcaatgacaacaa

SEQ ID NO: 25557 - RNA, 22 nt, synthetic construct
  source 1..22: mol_type = other RNA
tttaacctgatgctacactttg

SEQ ID NO: 25558 - RNA, 22 nt, synthetic construct
  source 1..22: mol_type = other RNA
tttaactatgtagctcctgtaa

SEQ ID NO: 25559 - RNA, 22 nt, synthetic construct
  source 1..22: mol_type = other RNA
tttaagaacgtgaactagggag

SEQ ID NO: 25560 - RNA, 22 nt, synthetic construct
  source 1..22: mol_type = other RNA
tttaagtaaatggagtgagcga

SEQ ID NO: 25561 - RNA, 22 nt, synthetic construct
  source 1..22: mol_type = other RNA
tttaatcctgcagattcaaatg

SEQ ID NO: 25562 - RNA, 22 nt, synthetic construct
  source 1..22: mol_type = other RNA
tttaatggaatctcacctccct

SEQ ID NO: 25563 - RNA, 22 nt, synthetic construct
  source 1..22: mol_type = other RNA
tttacagagaattggatctgag

SEQ ID NO: 25564 - RNA, 22 nt, synthetic construct
  source 1..22: mol_type = other RNA
tttacagcaagttgtctaaccc

SEQ ID NO: 25565 - RNA, 22 nt, synthetic construct
  source 1..22: mol_type = other RNA
tttacaggatgaattctgttct

SEQ ID NO: 25566 - RNA, 22 nt, synthetic construct
  source 1..22: mol_type = other RNA
tttacatgtcgctcactccatt

SEQ ID NO: 25567 - RNA, 22 nt, synthetic construct
  source 1..22: mol_type = other RNA
tttactgagcagtaaggaaata

SEQ ID NO: 25568 - RNA, 22 nt, synthetic construct
  source 1..22: mol_type = other RNA
tttacttaaagttggctagaca

SEQ ID NO: 25569 - RNA, 22 nt, synthetic construct
  source 1..22: mol_type = other RNA
tttagaggaagaaaaagggaga

SEQ ID NO: 25570 - RNA, 22 nt, synthetic construct
  source 1..22: mol_type = other RNA
tttagctgaaagctaagtccaa

SEQ ID NO: 25571 - RNA, 22 nt, synthetic construct
  source 1..22: mol_type = other RNA
tttagcttttgcttgagaaacc

SEQ ID NO: 25572 - RNA, 22 nt, synthetic construct
  source 1..22: mol_type = other RNA
tttaggacaatcatcctaacaa

SEQ ID NO: 25573 - RNA, 22 nt, synthetic construct
  source 1..22: mol_type = other RNA
tttaggctgggttcatttgtat

SEQ ID NO: 25574 - RNA, 22 nt, synthetic construct
  source 1..22: mol_type = other RNA
tttagggaggtgagattccatt

SEQ ID NO: 25575 - RNA, 22 nt, synthetic construct
  source 1..22: mol_type = other RNA
tttagtcataccagccactttt

SEQ ID NO: 25576 - RNA, 22 nt, synthetic construct
  source 1..22: mol_type = other RNA
tttagtgttatcttttgatcca

SEQ ID NO: 25577 - RNA, 22 nt, synthetic construct
  source 1..22: mol_type = other RNA
tttataccatttgagacccttg

SEQ ID NO: 25578 - RNA, 22 nt, synthetic construct
  source 1..22: mol_type = other RNA
tttatatgtggcccaagacagt

SEQ ID NO: 25579 - RNA, 22 nt, synthetic construct
  source 1..22: mol_type = other RNA
tttatcctgaggaattataata

SEQ ID NO: 25580 - RNA, 22 nt, synthetic construct
  source 1..22: mol_type = other RNA
tttatcctttttccttagctgg

SEQ ID NO: 25581 - RNA, 22 nt, synthetic construct
  source 1..22: mol_type = other RNA
tttatctaatttgaattgcaac

SEQ ID NO: 25582 - RNA, 22 nt, synthetic construct
  source 1..22: mol_type = other RNA
tttatgtctgtctctagaaaaa

SEQ ID NO: 25583 - RNA, 22 nt, synthetic construct
  source 1..22: mol_type = other RNA
tttattaatcttgagcattgga

SEQ ID NO: 25584 - RNA, 22 nt, synthetic construct
  source 1..22: mol_type = other RNA
tttattcctccctagttcacgt

SEQ ID NO: 25585 - RNA, 22 nt, synthetic construct
  source 1..22: mol_type = other RNA
tttatttccttactgctcagta

SEQ ID NO: 25586 - RNA, 22 nt, synthetic construct
  source 1..22: mol_type = other RNA
tttcacctgtcattttcatgct

SEQ ID NO: 25587 - RNA, 22 nt, synthetic construct
  source 1..22: mol_type = other RNA
tttcactattttccacatacta

SEQ ID NO: 25588 - RNA, 22 nt, synthetic construct
  source 1..22: mol_type = other RNA
tttcactgttgtccaaggcagg

SEQ ID NO: 25589 - RNA, 22 nt, synthetic construct
  source 1..22: mol_type = other RNA
tttcacttcctggaaacacttg

SEQ ID NO: 25590 - RNA, 22 nt, synthetic construct
  source 1..22: mol_type = other RNA
tttcatgctctatcttccttta

SEQ ID NO: 25591 - RNA, 22 nt, synthetic construct
  source 1..22: mol_type = other RNA
tttcattttatcctttttcctt

SEQ ID NO: 25592 - RNA, 22 nt, synthetic construct
  source 1..22: mol_type = other RNA
tttcatttttcactattttcca

SEQ ID NO: 25593 - RNA, 22 nt, synthetic construct
  source 1..22: mol_type = other RNA
tttccaatgctcaagattaata

SEQ ID NO: 25594 - RNA, 22 nt, synthetic construct
  source 1..22: mol_type = other RNA
tttccacatactacacacacaa

SEQ ID NO: 25595 - RNA, 22 nt, synthetic construct
  source 1..22: mol_type = other RNA
tttccaggaagtgaaaacttgt

SEQ ID NO: 25596 - RNA, 22 nt, synthetic construct
  source 1..22: mol_type = other RNA
tttccatttgttgtacttgctc

SEQ ID NO: 25597 - RNA, 22 nt, synthetic construct
  source 1..22: mol_type = other RNA
tttccttactgctcagtaaaaa

SEQ ID NO: 25598 - RNA, 22 nt, synthetic construct
  source 1..22: mol_type = other RNA
tttccttagctgggattctgtc

SEQ ID NO: 25599 - RNA, 22 nt, synthetic construct
  source 1..22: mol_type = other RNA
tttcgcgagacaccaggctacc

SEQ ID NO: 25600 - RNA, 22 nt, synthetic construct
  source 1..22: mol_type = other RNA
tttcggcttccctgggccacac

SEQ ID NO: 25601 - RNA, 22 nt, synthetic construct
  source 1..22: mol_type = other RNA
tttctagagacagacataaagc

SEQ ID NO: 25602 - RNA, 22 nt, synthetic construct
  source 1..22: mol_type = other RNA
tttctataactcaagatatgat

SEQ ID NO: 25603 - RNA, 22 nt, synthetic construct
  source 1..22: mol_type = other RNA
tttctattaagatttaacctga

SEQ ID NO: 25604 - RNA, 22 nt, synthetic construct
  source 1..22: mol_type = other RNA
tttctccctctcttgatcttgg

SEQ ID NO: 25605 - RNA, 22 nt, synthetic construct
  source 1..22: mol_type = other RNA
tttctctttttactgagcagta

SEQ ID NO: 25606 - RNA, 22 nt, synthetic construct
  source 1..22: mol_type = other RNA
tttctgtcctacaagttttcac

SEQ ID NO: 25607 - RNA, 22 nt, synthetic construct
  source 1..22: mol_type = other RNA
tttctgttcttaccagttagta

SEQ ID NO: 25608 - RNA, 22 nt, synthetic construct
  source 1..22: mol_type = other RNA
tttcttcctctaaatacctctc

SEQ ID NO: 25609 - RNA, 22 nt, synthetic construct
  source 1..22: mol_type = other RNA
tttcttctgactcctgagcagt

SEQ ID NO: 25610 - RNA, 22 nt, synthetic construct
  source 1..22: mol_type = other RNA
tttgaaatccaaactcattaac

SEQ ID NO: 25611 - RNA, 22 nt, synthetic construct
  source 1..22: mol_type = other RNA
tttgaaggaatagtgtcttgta

SEQ ID NO: 25612 - RNA, 22 nt, synthetic construct
  source 1..22: mol_type = other RNA
tttgaatctgcaggattaaaag

SEQ ID NO: 25613 - RNA, 22 nt, synthetic construct
  source 1..22: mol_type = other RNA
tttgaattgcaactgtggacag

SEQ ID NO: 25614 - RNA, 22 nt, synthetic construct
  source 1..22: mol_type = other RNA
tttgacattttattaatcttga

SEQ ID NO: 25615 - RNA, 22 nt, synthetic construct
  source 1..22: mol_type = other RNA
tttgagacccttgctgcaccac

SEQ ID NO: 25616 - RNA, 22 nt, synthetic construct
  source 1..22: mol_type = other RNA
tttgatccatcttacatcttgt

SEQ ID NO: 25617 - RNA, 22 nt, synthetic construct
  source 1..22: mol_type = other RNA
tttgcatccctaccaggcatct

SEQ ID NO: 25618 - RNA, 22 nt, synthetic construct
  source 1..22: mol_type = other RNA
tttgctcatcagctgtccttta

SEQ ID NO: 25619 - RNA, 22 nt, synthetic construct
  source 1..22: mol_type = other RNA
tttgcttgagaaaccagtgctt

SEQ ID NO: 25620 - RNA, 22 nt, synthetic construct
  source 1..22: mol_type = other RNA
tttggaagctatcacacaggca

SEQ ID NO: 25621 - RNA, 22 nt, synthetic construct
  source 1..22: mol_type = other RNA
tttggaatgctacccttgctgc

SEQ ID NO: 25622 - RNA, 22 nt, synthetic construct
  source 1..22: mol_type = other RNA
tttggagcatttttctagagac

SEQ ID NO: 25623 - RNA, 22 nt, synthetic construct
  source 1..22: mol_type = other RNA
tttgggtaactgcaattcattc

SEQ ID NO: 25624 - RNA, 22 nt, synthetic construct
  source 1..22: mol_type = other RNA
tttgggtcatagaacaacagac

SEQ ID NO: 25625 - RNA, 22 nt, synthetic construct
  source 1..22: mol_type = other RNA
tttggtcatgccttccatggtc

SEQ ID NO: 25626 - RNA, 22 nt, synthetic construct
  source 1..22: mol_type = other RNA
tttggtggtgcagcaagggtct

SEQ ID NO: 25627 - RNA, 22 nt, synthetic construct
  source 1..22: mol_type = other RNA
tttgtactgcgtgggtcatagt

SEQ ID NO: 25628 - RNA, 22 nt, synthetic construct
  source 1..22: mol_type = other RNA
tttgtatcacacagacctattc

SEQ ID NO: 25629 - RNA, 22 nt, synthetic construct
  source 1..22: mol_type = other RNA
tttgtggggtggttctttttgg

SEQ ID NO: 25630 - RNA, 22 nt, synthetic construct
  source 1..22: mol_type = other RNA
tttgtggtggaaccaatctgtc

SEQ ID NO: 25631 - RNA, 22 nt, synthetic construct
  source 1..22: mol_type = other RNA
tttgtgtgtgtagtatgtggaa

SEQ ID NO: 25632 - RNA, 22 nt, synthetic construct
  source 1..22: mol_type = other RNA
tttgttggacttagctttcagc

SEQ ID NO: 25633 - RNA, 22 nt, synthetic construct
  source 1..22: mol_type = other RNA
tttgttgtacttgctcctctag

SEQ ID NO: 25634 - RNA, 22 nt, synthetic construct
  source 1..22: mol_type = other RNA
ttttaaaaaagcagttttcttc

SEQ ID NO: 25635 - RNA, 22 nt, synthetic construct
  source 1..22: mol_type = other RNA
ttttaaaagggcagtttgggtc

SEQ ID NO: 25636 - RNA, 22 nt, synthetic construct
  source 1..22: mol_type = other RNA
ttttaaagatgtgcctgccttg

SEQ ID NO: 25637 - RNA, 22 nt, synthetic construct
  source 1..22: mol_type = other RNA
ttttaatcctgcagattcaaat

SEQ ID NO: 25638 - RNA, 22 nt, synthetic construct
  source 1..22: mol_type = other RNA
ttttactgagcagtaaggaaat

SEQ ID NO: 25639 - RNA, 22 nt, synthetic construct
  source 1..22: mol_type = other RNA
ttttagcttttgcttgagaaac

SEQ ID NO: 25640 - RNA, 22 nt, synthetic construct
  source 1..22: mol_type = other RNA
ttttagggaggtgagattccat

SEQ ID NO: 25641 - RNA, 22 nt, synthetic construct
  source 1..22: mol_type = other RNA
ttttataccatttgagaccctt

SEQ ID NO: 25642 - RNA, 22 nt, synthetic construct
  source 1..22: mol_type = other RNA
ttttatcctgaggaattataat

SEQ ID NO: 25643 - RNA, 22 nt, synthetic construct
  source 1..22: mol_type = other RNA
ttttatcctttttccttagctg

SEQ ID NO: 25644 - RNA, 22 nt, synthetic construct
  source 1..22: mol_type = other RNA
ttttatctaatttgaattgcaa

SEQ ID NO: 25645 - RNA, 22 nt, synthetic construct
  source 1..22: mol_type = other RNA
ttttattaatcttgagcattgg

SEQ ID NO: 25646 - RNA, 22 nt, synthetic construct
  source 1..22: mol_type = other RNA
ttttattcctccctagttcacg

SEQ ID NO: 25647 - RNA, 22 nt, synthetic construct
  source 1..22: mol_type = other RNA
ttttatttccttactgctcagt

SEQ ID NO: 25648 - RNA, 22 nt, synthetic construct
  source 1..22: mol_type = other RNA
ttttcactattttccacatact

SEQ ID NO: 25649 - RNA, 22 nt, synthetic construct
  source 1..22: mol_type = other RNA
ttttcacttcctggaaacactt

SEQ ID NO: 25650 - RNA, 22 nt, synthetic construct
  source 1..22: mol_type = other RNA
ttttcatgctctatcttccttt

SEQ ID NO: 25651 - RNA, 22 nt, synthetic construct
  source 1..22: mol_type = other RNA
ttttcattttatcctttttcct

SEQ ID NO: 25652 - RNA, 22 nt, synthetic construct
  source 1..22: mol_type = other RNA
ttttccaatgctcaagattaat

SEQ ID NO: 25653 - RNA, 22 nt, synthetic construct
  source 1..22: mol_type = other RNA
ttttccacatactacacacaca

SEQ ID NO: 25654 - RNA, 22 nt, synthetic construct
  source 1..22: mol_type = other RNA
ttttccatttgttgtacttgct

SEQ ID NO: 25655 - RNA, 22 nt, synthetic construct
  source 1..22: mol_type = other RNA
ttttccttagctgggattctgt

SEQ ID NO: 25656 - RNA, 22 nt, synthetic construct
  source 1..22: mol_type = other RNA
ttttctagagacagacataaag

SEQ ID NO: 25657 - RNA, 22 nt, synthetic construct
  source 1..22: mol_type = other RNA
ttttctataactcaagatatga

SEQ ID NO: 25658 - RNA, 22 nt, synthetic construct
  source 1..22: mol_type = other RNA
ttttctattaagatttaacctg

SEQ ID NO: 25659 - RNA, 22 nt, synthetic construct
  source 1..22: mol_type = other RNA
ttttctctttttactgagcagt

SEQ ID NO: 25660 - RNA, 22 nt, synthetic construct
  source 1..22: mol_type = other RNA
ttttcttcctctaaatacctct

SEQ ID NO: 25661 - RNA, 22 nt, synthetic construct
  source 1..22: mol_type = other RNA
ttttcttctgactcctgagcag

SEQ ID NO: 25662 - RNA, 22 nt, synthetic construct
  source 1..22: mol_type = other RNA
ttttgaaatccaaactcattaa

SEQ ID NO: 25663 - RNA, 22 nt, synthetic construct
  source 1..22: mol_type = other RNA
ttttgaaggaatagtgtcttgt

SEQ ID NO: 25664 - RNA, 22 nt, synthetic construct
  source 1..22: mol_type = other RNA
ttttgatccatcttacatcttg

SEQ ID NO: 25665 - RNA, 22 nt, synthetic construct
  source 1..22: mol_type = other RNA
ttttgctcatcagctgtccttt

SEQ ID NO: 25666 - RNA, 22 nt, synthetic construct
  source 1..22: mol_type = other RNA
ttttgcttgagaaaccagtgct

SEQ ID NO: 25667 - RNA, 22 nt, synthetic construct
  source 1..22: mol_type = other RNA
ttttggaatgctacccttgctg

SEQ ID NO: 25668 - RNA, 22 nt, synthetic construct
  source 1..22: mol_type = other RNA
ttttggagcatttttctagaga

SEQ ID NO: 25669 - RNA, 22 nt, synthetic construct
  source 1..22: mol_type = other RNA
tttttaaaagggcagtttgggt

SEQ ID NO: 25670 - RNA, 22 nt, synthetic construct
  source 1..22: mol_type = other RNA
tttttaaagatgtgcctgcctt

SEQ ID NO: 25671 - RNA, 22 nt, synthetic construct
  source 1..22: mol_type = other RNA
tttttactgagcagtaaggaaa

SEQ ID NO: 25672 - RNA, 22 nt, synthetic construct
  source 1..22: mol_type = other RNA
tttttatctaatttgaattgca

SEQ ID NO: 25673 - RNA, 22 nt, synthetic construct
  source 1..22: mol_type = other RNA
tttttcactattttccacatac

SEQ ID NO: 25674 - RNA, 22 nt, synthetic construct
  source 1..22: mol_type = other RNA
tttttccttagctgggattctg

SEQ ID NO: 25675 - RNA, 22 nt, synthetic construct
  source 1..22: mol_type = other RNA
tttttctagagacagacataaa

SEQ ID NO: 25676 - RNA, 22 nt, synthetic construct
  source 1..22: mol_type = other RNA
tttttctattaagatttaacct

SEQ ID NO: 25677 - RNA, 22 nt, synthetic construct
  source 1..22: mol_type = other RNA
tttttcttcctctaaatacctc

SEQ ID NO: 25678 - RNA, 22 nt, synthetic construct
  source 1..22: mol_type = other RNA
tttttgaaatccaaactcatta

SEQ ID NO: 25679 - RNA, 22 nt, synthetic construct
  source 1..22: mol_type = other RNA
tttttgaaggaatagtgtcttg

SEQ ID NO: 25680 - RNA, 22 nt, synthetic construct
  source 1..22: mol_type = other RNA
tttttgctcatcagctgtcctt

SEQ ID NO: 25681 - RNA, 22 nt, synthetic construct
  source 1..22: mol_type = other RNA
tttttggaatgctacccttgct

SEQ ID NO: 25682 - RNA, 22 nt, synthetic construct
  source 1..22: mol_type = other RNA
tttttggagcatttttctagag

SEQ ID NO: 25683 - RNA, 22 nt, synthetic construct
  source 1..22: mol_type = other RNA
ttttttaaaagggcagtttggg

SEQ ID NO: 25684 - RNA, 22 nt, synthetic construct
  source 1..22: mol_type = other RNA
ttttttatctaatttgaattgc

SEQ ID NO: 25685 - RNA, 22 nt, synthetic construct
  source 1..22: mol_type = other RNA
ttttttgaaatccaaactcatt

SEQ ID NO: 25686 - RNA, 22 nt, synthetic construct
  source 1..22: mol_type = other RNA
ttttttgctcatcagctgtcct

SEQ ID NO: 25687 - RNA, 20 nt, synthetic construct
  source 1..20: mol_type = other RNA
aaaaaaatgtacttggttcc

SEQ ID NO: 25688 - RNA, 17 nt, synthetic construct
  source 1..17: mol_type = other RNA
aaaatgtacttggttcc

SEQ ID NO: 25689 - RNA, 17 nt, synthetic construct
  source 1..17: mol_type = other RNA
aaaaatgtacttggttc

SEQ ID NO: 25690 - RNA, 17 nt, synthetic construct
  source 1..17: mol_type = other RNA
aaaaaatgtacttggtt

SEQ ID NO: 25691 - RNA, 17 nt, synthetic construct
  source 1..17: mol_type = other RNA
aaaaaaatgtacttggt